(19) United States
(12) Patent Application Publication
(10) Pub. No.: US 2005/0036989 A1
(43) Pub. Date: Feb. 17, 2005

(54) Subgroup B adenoviral vectors for treating disease

(75) Inventors: Jerry Yuqiao Shen, Orinda, CA (US); Annie Shen, Richmond, CA (US); Aleida Perez, Alameda, CA (US); Elizabeth Sevilla, San Jose, CA (US); Amy Aspelund, Crockett, CA (US)

Correspondence Address: ONYX PHARMACEUITICALS, INC., 3031 RESEARCH DRIVE, RICHMOND, CA, 94806, US

(73) Assignee: Onyx Pharmaceuticals, Inc., Richmond, CA (US)

(21) Appl. No.: 10/874,049

(22) Filed: Jun. 22, 2004

Related U.S. Application Data
(60) Provisional application No. 60/488,678, filed on Jul. 18, 2003.

(51) Int. Cl. A61K 48/00; C12N 15/86

(52) U.S. Cl. 424/93.2; 435/456

(57) ABSTRACT

Methods and compositions for treating disease using human subgroup B adenovirus, vectors derived from such viruses, including expression vector systems in which one or more subgroup B adenoviral genes are replaced by a foreign gene.

### FIELD OF THE INVENTION

[0001] The invention described herein relates to the field of treating disease using human subgroup B adenoviruses.

### BACKGROUND OF THE INVENTION

[0002] Conditionally replicating viruses represent a promising new class of anti-cancer agents. Derivatives of human adenovirus type 5 (Ad5) have been developed that selectively replicate in, and kill, cancer cells. The prototype of such viruses, ONYX-015, a subgroup C adenovirus, has demonstrated encouraging results in several phase I and phase II clinical trials with patients having recurrent head-and-neck cancer, and patients having liver metastatic disease.

[0003] In order for adenovirus to replicate efficiently in cells, the adenoviral E1b gene product, p55, forms a complex with the host cell p53 protein, thereby sequestering and/or inactivating p53 and producing a cell that is deficient in p53 function. Such a cell made deficient in p53 function can support replication of the adenovirus. In this way, wild-type adenovirus is able to replicate in cells containing p53, as the adenovirus p55 proteins inactivates and/or sequesters the host cell p53 protein. Onyx-015 is a recombinant adenovirus comprising an E1b locus encoding a mutant p55 protein that is substantially incapable of forming a functional complex with p53 protein in infected cells when it is administered to an individual or cell population comprising a neoplastic cell capable of being infected by the recombinant adenovirus. The substantial incapacity of the recombinant adenovirus to effectively sequester p53 protein in infected non-neoplastic cells results in the introduced recombinant adenoviral polynucleotide(s) failing to express a replication phenotype in non-neoplastic cells. By contrast, neoplastic cells which lack a functional p53 protein support expression of a replication phenotype by the introduced recombinant adenovirus which leads to ablation of the neoplastic cell by an adenoviral cytopathic effect and/or expression of a negative selection gene linked to the replication phenotype.

[0004] A lesson learned from the on-going clinical trials with Onyx-015 is that efficacy rather than toxicity appears to limit its therapeutic benefit. To date, no dose-limiting toxicity has been observed. One strategy to enhance the clinical efficacy of oncolytic viruses is to combine them with other therapies, eg. standard chemotherapy, or to arm them with anti-cancer genes, such as anti-angiogenesis factors, cytotoxic agents, pro-drug converting enzymes, or cytokines, etc. Another approach, which can be combined with chemotherapy and anti-cancer genes, is to genetically alter the virus to render it more potent, i.e. replicate faster, produce more viral progenies, and enhance tissue and/or cell type specificity etc. The goal here being to generate therapeutic viruses that kill cancer cells more rapidly, selectively, and eventually eradicate the cancer.

[0005] A critical aspect of such therapeutic strategies depends on the ability of adenovirus to enter target cells. This process is a multi-step event believed to be initiated by attachment of the virus to cells by binding of the adenovirus fiber-knob protein to its cellular receptor CAR (Bergelson et al. (1997) Science 275: 1320-1323). In a second step, internalization of the virus is then mediated by αvβ₃ and αvβ₅ integrins through interaction with the RGD-domain of the adenovirus penton base (Wickham et al. (1993) Cell 73: 309-319; Mathias et al. (1994) J. Virol. 68: 6811-6814). After internalization, the virus particles travel to the nuclear membrane. During this process, the capsid is removed and finally the viral DNA is released into the nucleus where replication of viral DNA is initiated. The presence of CAR on cells appears to be a major determining factor for the efficacy of adenovirus infection. In contrast, there is no association with the expression of secondary adenovirus receptors, including αvβ₃ and αvβ₅ integrins (Hemmi et al. (1998) Hum Gene Ther. 9: 2363-2373).

[0006] A potential drawback to using subgroup C adenovirus to treat cancer is two fold. First, recent experimental work has shown that CAR expression is reduced in tumor cells compared to normal cells both in vitro and in vivo in patients suffering from certain forms of cancer. It was found by RT-PCR and Western blot analysis that there is a good correlation between the level of CAR expression and the transfection efficiency adenovirus. (Jee Y S, Lee S G, Lee J C, Kim M J, Lee J J, Kim D Y, Park S W, Sung M W, Heo DS. Anticancer Res 2002 Sep-Oct;22(5):2629-34). Also, transfection of CAR into human bladder carcinoma cells with no endogenous CAR expression increased infectibility of these cells significantly (Li et al. (1999) Cancer Res. 59: 325-330).

[0007] A second drawback associated with using subgroup C adenovirus for cancer therapy is the presence of CAR in hepocytes that has the undesirable side effect of faciliting the accumulation of the virus in the liver. Subgroup B viruses which subgroup B system and optimal tandem fiber system demonstrate reduced liver transduction by over 2 logs compared to an Ad5 fiber vector Schoggins J W, Gall J G, Falck-Pedersen E. J Virol 2003 January;77(2):1039-48.

[0008] As mentioned above, the prototype oncolytic adenovirus is Onyx 015, which is a subgroup C virus. For the reasons discussed above, adenoviral vectors constructed from subgroup C viruses have certain properties that limit their oncolytic potential. To provide the physican with another oncolytic virus, it would be beneficial to produce an adenovirus that has the properies of Onyx 015, and the properties of subgroup B adenoviruses.

[0009] There are reports in the scientific and patent literature that describe genetic aspects of subgroup B adenoviruses, including nucleotide sequences of certain regions of these viruses.

[0010] WO0240693A1 shows adenoviral replicon comprises a recombinant adenovirus with a fusion between DNA from Ad5 and subgroup B adenoviral DNA.

[0011] WO0240665 shows a packaging cell line capable of complementing recombinant adenoviruses based on serotypes from subgroup B, preferably adenovirus type 35.

[0012] WO0227006 shows a means and methods for transduction of a skeletal muscle cell

[0013] use of a gene delivery vehicle derived from an adenovirus, having a tropism for said cells. The gene delivery vehicle comprises at least a tropism determining part of an adenoviral fiber protein of subgroup B

[0014] WO0052186 describes an adenovirus subgroup B nucleic acid delivery vehicle with a tissue tropism for fibroblast-like or macrophage-like cells.

[0015] WO0031285 provides a nucleic acid delivery vehicle with a tissue tropism for smooth muscle cells and/or endothelial cells. In one aspect the nucleic acid delivery vehicle is a virus capsid of a subgroup B adenovirus.

[0016] WO8906282 describes a functional mutated E1A gene of human adenovirus subgroup B:1 having a modified autorepression functional domain.

[0017] U.S. Pat. No. 6,492,169 presents a packaging cell line to complement recombinant adenoviruses based on serotypes from subgroup B, preferably adenovirus type 35.

[0018] U.S. Pat. No. 5,770,442 shows a recombinant adenovirus comprising a subgroup B adenoviral chimeric fiber protein

[0019] U.S. No. 4,920,211 shows a functional mutated E1A gene of human adenovirus subgroup B:1 which has a modified autorepression functional domain that is effective to express E1 A products that stimulate without net repression of promoters controlling an E1 A mutated gene

### BRIEF DESCRIPTION OF THE DRAWINGS

[0020] FIG. 1 shows the complete nucleotide sequence of human subgroup B adenovirus type-3 and the region that encodes the E1B55K protein.

[0021] FIG. 2 shows the complete nucleotide sequence of human subgroup B adenovirus type-34 and the region that encodes the E1B55K protein.

[0022] FIG. 3 shows the cDNA nucleotide sequence of the E1A region of human subgroup B adenovirus type-3.

[0023] FIG. 4 shows the amino acid sequence of the E1A region encoded by the cDNA of human subgroup B adenovirus type-3.

[0024] FIG. 5 shows the cDNA nucleotide sequence of the E1A region of human subgroup B adenovirus type-34.

[0025] FIG. 6 shows the amino acid sequence of the E1A region encoded by the cDNA of human subgroup B adenovirus type-34.

[0026] FIG. 7 shows the DNA sequence of open reading frame 6 of human subgroup B adenovirus type-3.

### SUMMARY OF THE INVENTION

[0027] A feature of the present invention is the description of recombinant, oncolytic human subgroup B adenoviruses.

[0028] The invention also presents the full genomic sequences of human subgroup B adenoviruses types 3 and 34.

[0029] In another aspect, the invention includes the use of recombinant, human subgroup B adenoviruses, and recombinant viral vectors derived therefrom for the expression of a heterogenous DNA sequence.

[0030] Another embodiment of the present invention relates to human adenovirus expression vector systems based on subgroup B types 3 and 34 in which part, or all of one or both of the E1 and E3 gene regions are deleted.

[0031] A feature of the present invention is the description of recombinant, oncolytic human subgroup B adenoviruses that lack an expressed viral oncoprotein capable of binding a functional tumor suppressor gene product, and that infect cells primarily by a CAR indepenent mechanism.

[0032] Another feature of the present invention is the description of an oncolytic human subgroup B adenovirus that lacks an expressed viral oncoprotein capable of binding a functional tumor suppressor gene product.

[0033] Another aspect of the invention relates to human subgroup B adenoviruses which lack the ability to encode a functional E1A or E1B 55k viral oncoprotein.

[0034] A further aspect of the invention is a description of treating disease using recombinant, human subgroup B adenoviruses.

[0035] These and other aspects of the invention will become apparent to a skilled practitioner of this field upon a full consideration of the following.

### DETAILED DESCRIPTION OF THE INVENTION

[0036] All publications and patent applications cited throughout this patent are incorporated by reference to the same extent as if each individual publication or patent/patent application is specifically and individually indicated to be incorporated by reference in their entirety.

[0037] The practice of the present invention will employ, unless otherwise indicated, conventional microbiology, immunology, virology, molecular biology, and recombinant DNA techniques which are within the skill of the art. These techniques are fully explained in the literature. See, eg., Maniatis et al., Molecular Cloning: A Laboratory Manual (1982); DNA Cloning: A Practical Approach, vols. I & II (D. Glover, ed.); Oligonucleotide Synthesis (N. Gait, ed. (1984)); Nucleic Acid Hybridization (B. Hames & S. Higgins, eds. (1985)); Transcription and Translation (B. Hames & S. Higgins, eds. (1984)); Animal Cell Culture (R. Freshney, ed. (1986)); Perbal, A Practical Guide to Molecular Cloning (1984). Sambrook et al., Molecular Cloning: A Laboratory Manual (2.sup.nd Edition); vols. I, II & III (1989). See also, Hermiston, T. et al., Methods in Molecular Medicine: Adenovirus Methods and Protocols, W. S. M. Wold, ed, Humana Press, 1999.

[0038] A. Definitions

[0039] Unless defined otherwise, all technical and scientific terms used herein have thesame meaning as commonly understood by one of ordinary skill in the art to which this invention belongs. Although any methods and materials similar or equivalent to those described herein can be used in the practice or testing of the present invention, the preferred methods and materials are described.

[0040] The definitions set forth in U.S. Pat. Nos. 5,677,178, and 5,801,029 are applicable here and include the following terms.

[0041] “Replication deficient virus” refers to a virus that preferentially inhibits cell proliferation in a predetermined cell population (e.g., cells substantially lacking p53, and/or RB function) which supports expression of a virus replication phenotype, and which is substantially unable to inhibit cell proliferation, induce apoptosis, or express a replication phenotype in cells comprising normal p53 or RB levels characteristic of non-replicating, non-transformed cells. Typically, a replication deficient virus exhibits a substantial decrease in plaquing efficiency on cells comprising normal p53 or RB function.

[0042] As used herein, the term “p53 function” refers to the property of having an essentially normal level of a polypeptide encoded by the p53 gene (i.e., relative to non-neoplastic cells of the same histological type), wherein the p53 polypeptide is capable of binding an E1b p55 protein of subgroup C wild-type adenovirus 34. For example, p53 function may be lost by production of an inactive (i.e., mutant) form of p53 or by a substantial decrease or total loss of expression of p53 polypeptide(s). Also, p53 function may be substantially absent in neoplastic cells which comprise p53 alleles encoding wild-type p53 protein; for example, a genetic alteration outside of the p53 locus, such as a mutation that results in aberrant subcellular processing or localization of p53 (e.g., a mutation resulting in localization of p53 predominantly in the cytoplasm rather than the nucleus), or the loss or inactivation of a molecule by which p53 acts, can result in a loss of p53 function. That is, there may be an alteration in the biochemical pathway by which p53 acts, which would cause a loss of p53 function.

[0043] As used herein, the term “replication phenotype” refers to one or more of the following phenotypic characteristics of cells infected with a virus such as a replication deficient adenovirus: (1) substantial expression of late gene products, such as capsid proteins (e.g., adenoviral penton base polypeptide) or RNA transcripts initiated from viral late gene promoter(s), (2) replication of viral genomes or formation of replicative intermediates, (3) assembly of viral capsids or packaged virion particles, (4) appearance of cytopathic effect (CPE) in the infected cell, (5) completion of a viral lytic cycle, and (6) other phenotypic alterations which are typically contingent upon abrogation of p53 function in non-neoplastic cells infected with a wild-type replication competent DNA virus encoding functional oncoprotein(s). A replication phenotype comprises at least one of the listed phenotypic characteristics, preferably more than one of the phenotypic characteristics.

[0044] The term “antineoplastic replication deficient virus” is used herein to refer to a recombinant virus which has the functional property of inhibiting development or progression of a neoplasm in a human, by preferential cell killing of infected neoplastic cells relative to infected nonreplicating, non-neoplastic cells of the same histological cell type.

[0045] As used herein, “neoplastic,” “neoplasia,” “cancer,” or “tumor” refer to cells which exhibit relatively autonomous growth, so that they exhibit an aberrant growth phenotype characterized by a significant loss of control of cell proliferation.

[0046] As used herein, the term “operably linked” refers to a linkage of polynucleotide elements in a functional relationship. A nucleic acid is “operably linked” when it is placed into a functional relationship with another nucleic acid sequence. For instance, a promoter or enhancer is operably linked to a coding sequence if it affects the transcription of the coding sequence. Operably linked means that the DNA sequences being linked are typically contiguous and, where necessary to join two protein coding regions, contiguous and in reading frame. However, since enhancers generally function when separated from the promoter by several kilobases and intronic sequences may be of variable lengths, some polynucleotide elements may be operably linked but not contiguous.

[0047] As used herein, “physiological conditions” refers to an aqueous environment having an ionic strength, pH, and temperature substantially similar to conditions in an intact mammalian cell or in a tissue space or organ of a living mammal. Typically, physiological conditions comprise an aqueous solution having about 150 mM NaCl (or optionally KCl), pH-6.5-8.1, and a temperature of approximately 20.degree.-45.degree. C. Generally, physiological conditions are suitable binding conditions for intermolecular association of biological macromolecules. For example, physiological conditions of 150 mM NaCl, pH 7.4, at 37.degree. C. are generally suitable.

[0048] A DNA “coding sequence” is a DNA sequence which is transcribed and translated into a polypeptide in vivo when placed under the control of appropriate regulatory sequences. The boundaries of the coding sequence are determined by a start codon at the 5′ (amino) terminus and a translation stop codon at the 3′ (carboxy) terminus. A coding sequence can include, but is not limited to, procaryotic sequences, cDNA from eucaryotic mRNA, genomic DNA sequences from eucaryotic (e.g., mammalian) DNA, viral DNA, and even synthetic DNA sequences. A polyadenylation signal and transcription termination sequence will usually be located 3′ to the coding sequence.

[0049] A “transcriptional promoter sequence” is a DNA regulatory region capable of binding RNA polymerase in a cell and initiating transcription of a downstream (3′ direction) coding sequence. For purposes of defining the present invention, the promoter sequence is bound at the 3′ terminus by the translation start codon (ATG) of a coding sequence and extends upstream (5′ direction) to include the minimum number of bases or elements necessary to initiate transcription at levels detectable above background.

[0050] DNA “control sequences” refer collectively to promoter sequences, ribosome binding sites, splicing signals, polyadenylation signals, transcription termination sequences, upstream regulatory domains, enhancers, translational termination sequences and the like, which collectively provide for the transcription and translation of a coding sequence in a host cell.

[0051] A coding sequence or sequence encoding is “operably linked to” or “under the control of” control sequences in a cell when RNA polymerase will bind the promoter sequence and transcribe the coding sequence into mRNA, which is then translated into the polypeptide encoded by the coding sequence.

[0052] A “host cell” is a cell which has been transformed, or is capable of transformation, by an exogenous DNA sequence.

[0053] Two polypeptide sequences are “substantially homologous” when at least about 80% (preferably at least about 90%, and most preferably at least about 95%) of the amino acids match over a defined length of the molecule.

[0054] Two DNA sequences are “substantially homologous” when they are identical to or not differing in more that 40% of the nucleotides, preferably not more than about 30% of the nucleotides (i.e. at least about 70% homologous) more preferably about 20% of the nucleotides, and most preferably about 10% of the nucleotides.

[0055] DNA sequences that are substantially homologous can be identified in a Southern hybridization experiment under, for example, stringent conditions, as defined for that particular system. Highly stringent conditions would include hybridization to filter-bound DNA in 0.5M NaHPO4, 7% sodium dodecyl sulfate (SDS), 1 mM EDTA at 65° C., and washing in 0.1.times SSC/0.1% SDS at 68° C. (Ausubel F. M. et al., eds., 1989, Current Protocols in Molecular Biology, Vol. 1, Green Publishing Associates, Inc., and John Wiley & Sons, Inc., New York, at p. 2.10.3. Defining appropriate hybridization conditions is within the skill of the art. See, e.g., Maniatis et al., supra; DNA Cloning, vols. I & II, supra; Nucleic Acid Hybridization, supra.

[0056] A “heterologous” region of a DNA construct is an identifiable segment of DNA within or attached to another DNA molecule that is not found in association with the other molecule in nature.

[0057] “Fusion protein” is usually defined as the expression product of a gene comprising a first region encoding a leader sequence or a stabilizing polypeptide, and a second region encoding a heterologous protein. It involves a polypeptide comprising an antigenic protein fragment or a full length adenoviral protein sequence as well as (a) heterologous sequence(s), typically a leader sequence functional for secretion in a recombinant host for intracellularly expressed polypeptide. An antigenic protein fragment is usually about 5-7 amino acids in length.

[0058] “Recombinant” polypeptides refers to polypeptides produced by recombinant DNA techniques.

[0059] A “substantially pure” protein will be free of other proteins, preferably at least 10% homogeneous, more preferably 60% homogeneous, and most preferably 95% homogeneous.

[0060] By “infectious” is meant having the capacity to deliver the adenoviral genome into cells.

[0061] “CAR” refers to the receptor on cells which subgroup C adenovirus binds to in the process of infecting and gaining entry to a host cell. It is an acronym for Coksakie Adenovirus Receptor.

[0062] “Oncolytic” refers to the ability of the invention human subgroup B adenoviruses to kill neoplastic cells with substantial selectivity over normal cells; that is, while substantially sparing normal cells.

[0063] B. General Methods

[0064] Adenoviral subgroup B genomes/Coding regions: Human subgroup B adenoviral genomes can be obtained from the American Type Culture Collection (ATCC). The viruses, preferrably from subgroup B types 3 and 34, can be propagated using materials and methods well known in the art, including A549 cells and standard infection and growth techniques. Hermiston, T. et al., Methods in Molecular Medicine: Adenovirus Methods and Protocols, W. S. M. Wold, ed, Humana Press, 1999. Virus can be purified by any number of techiniques including cesium chloride gradient banding centrifugation. See, for example, U.S. Pat. No. 5,837,520 and U.S. Pat. No. 6,008,036.

[0065] Viral DNA is prepared for sequening by lysing the virus particles in a lysis solution, preferrably consisting of: 10 mM Tris-HCl (pH8.0), 5 mM EDTA, 0.6% SDS and 1.5 mg per ml of pronase (Sigma Corporation). The solution is preferrably at 37° C. Lysed viral particles are extracted with phenol/chloroform, and viral DNA is precipitated with ethanol. Purified viral DNAs are dissolved in distilled water and used for DNA sequencing.

[0066] Next, viral DNAs from either adenovirus subgroup B types 3, or 34, are subjected to limit digestion with an appropriate restriction enzyme, preferrably Sau 3AI, followed by resolving the digested DNAs in a 1% agarose gel. Fragments between 0.8 kb and 1.2 kb in size are purified using a commercial DNA gel extraction kit (Qiagen Corporation), and subsequently cloned into an appropriate vector previously digested with a compatible restriction enzyme. As described more in the Examples, Bam HI can be used to digest the vector, pGem-7zf(+) (Promega Corporation).

[0067] Next, several hundred individual clones are sequenced using an automated sequencer, CEQ20000XL (Beckman), and using standard T7 and SP6 Sequencing primers. Contigs were constructed using SeqMan Software (DNAStar Inc.). Based on the constructed sequences, oligonucleotides are synthesized and primer walking can be performed until all contiges are joined. As described below, most regions were covered by at least 2 independent sequencings.

[0068] The present invention discloses the complete nucleotide genomic sequences of the human subgroup B adenoviruses types 3 and 34. See FIG. 1 and FIG. 2, respectively. Also shown are the nucleotide sequences for certain regions of these viruses, including E1A (FIGS. 3 and 5, for types 3 and 34, respectively) the amino acid sequences for the E1A regions (FIGS. 4 and 6, for types 3 and 34, respectively). The nucleotide sequences that code for the E1 B region that encodes the 55K protein, and their amino acid sequences, are shown in FIG. 1 and FIG. 2 for adenoviruses types 3 and 34, respectively.

[0069] In addition to the genomic sequences of human subgroup B adenovirus types 3 and 34, various regions of these viruses were sequenced, and the amino acid sequence determined. FIG. 3

[0070] Recombinants: In one embodiment, the present invention identifies and provides a means of deleting part or all of nucleotide sequences of human subgroup B adenovirus, including the E1 region, particularly the E1B region, and/or E3 regions. If desired heterologous or homologous nucleotide sequences encoding foreign genes or fragments thereof can be inserted to generate human adenovirus recombinants. By “deleting part of” the nucleotide sequence is meant using conventional genetic engineering techniques for deleting the nucleotide sequence of part of the E1 and/or E3 region.

[0071] Insertions are made by art-recognized techniques including, but not limited to, restriction digestion, nuclease digestion, ligation, kinase and phosphatase treatment, DNA polymerase treatment, reverse transcriptase treatment, and chemical oligonucleotide synthesis. Foreign nucleic acid sequences of interest are cloned into plasmid vectors such that the foreign sequences are flanked by sequences having substantial homology to a region of the adenovirus genome into which insertion is to be directed. These constructs are then introduced into host cells that are coinfected with the desired subgroup B virus. During infection, homologous recombination between these constructs and adenoviral genomes will occur to generate recombinant adenoviral vectors. If the insertion occurs in an essential region of the adenoviral genome, the recombinant adenoviral vector is propagated in a helper cell line which supplies the viral function that was lost due to the insertion.

[0072] A preferred adenoviral deletion is one in which all or part of the E1B region that encodes the oncoprotein, 55K, is removed. This deletion has the effect of producing a replication deficient subgroup B adenovirus. Similarly, by making select mutations in the E1B region it is possible to generate subgroup B adenovirues that are replication deficient. See, U.S. Pat. No. 6,080,578. Such replication deficient subgroup B adenovirus will be oncolytic for tumor cells that lack p53 function, and that primarily infect neoplastic cells by non-CAR mechanisms. Because CAR is present at high levels on liver cells and is often reduced on tumor cells, a subgroup B replication deficient adenovirus will have enhanced systemic activity in that it will not readily be taken up by the liver compared, for example, to subgroup C adenoviruses. Thus, it will also exhibit elevated levels of oncolytic activity when compared to subgroup C adenoviruses.

[0073] In an alternative embodiment of the invention, a recombinant subgroup B adenovirus can be constructed that comprises a deletion or mutation in an E1a locus that encodes an E1a oncoprotein protein, which causes the E1a protein to be substantially incapable of forming a complex with RB protein in infected cells. See, for example, U.S. Pat. No. 5,801,029.

[0074] The advantage of this type of recombinant subgroup B virus is its substantial incapacity to effectively sequester RB protein in infected non-neoplastic cells which results in the introduced recombinant adenovirus failing to express a replication phenotype in non-neoplastic cells. By contrast, neoplastic cells which lack a functional RB protein support expression of a replication phenotype by the introduced recombinant adenovirus which leads to ablation of the neoplastic cell by an adenoviral cytopathic effect.

[0075] In preferred variations of these embodiments, the recombinant subgroup B adenovirus comprises an E1 a locus encoding a mutant E1 a protein that lacks a domain capable of binding pRB (and/or the 300 kd-polypeptide and/or the 107 kD polypeptide) but comprises a functional E1 a domain capable of transactivation of adenoviral early genes. Additional variations of these embodiments include those where the recombinant adenovirus comprises a nonfunctional E1 a locus which is substantially incapable of expressing a protein that binds to and inactivates pRB In another embodiment, the invention provides compositions and methods for constructing, isolating and propagating E3-deleted recombinant adenoviral subgroup B (with or without insertion of heterologous sequences) at high efficiency. These include isolation of recombinant virus in suitable cell lines, expressing adenovirus E1 function or equivalent cell lines, and methods wherein recombinant genomes are constructed via homologous recombination in the appropriate host cells, the recombinant genomes obtained thereby are transfected into suitable cell lines, and recombinant virus is isolated from the transfected cells. See, for example, U.S. Pat. No. 6,492,169.

[0076] In one embodiment of the invention, a recombinant adenoviral subgroup B expression cassette can be obtained by cleaving the wild-type genome with one or more appropriate restriction enzyme(s) to produce a viral restriction fragment comprising; for example, E1, preferrably E1A that encodes the oncoprotein that binds pRB, or E1B that encodes the 55K protein that binds p53, or E3 region sequences, respectively. The viral restriction fragment can be inserted into a cloning vehicle, such as a plasmid, and thereafter at least one heterologous sequence (which may or may not encode a foreign protein) can be inserted into the chosen viral region with or without an operatively-linked eukaryotic transcriptional regulatory sequence. The recombinant expression cassette is contacted with a adenoviral subgroup B genome and, through homologous recombination in a suitable host cell, or other conventional genetic engineering methods, the desired recombinant is obtained.

[0077] Suitable host cells include any cell that will support recombination between an adenoviral subgroup B genome and a plasmid containing viral sequences, or between two or more plasmids, each containing viral sequences. Recombination may be performed in procaryotic cells, such as E. coli, while transfection of a plasmid containing a viral genome, to generate virus particles, is conducted in eukaryotic cells, preferably mammalian cells, more preferably 293 cells, and their equivalents. The growth of bacterial cell cultures, as well as culture and maintenance of eukaryotic cells and mammalian cell lines are procedures which are well-known to those of skill in the art.

[0078] One or more heterologous sequences can be inserted into one or more regions of an adenoviral subgroup B genome to generate a recombinant viral vector, limited only by the insertion capacity of the viral genome and ability of the recombinant viral vector to express the inserted heterologous sequences. Fusion proteins can be generated in this way. In general, adenovirus genomes can accept inserts of approximately 5% of genome length and remain capable of being packaged into virus particles. The insertion capacity can be increased by deletion of non-essential regions and/or deletion of essential regions whose function is provided by a helper cell line.

[0079] In one embodiment of the invention, insertion can be achieved by constructing a plasmid containing the region of the subgroup B adenoviral genome into which insertion is desired. The plasmid is then digested with a restriction enzyme having a recognition sequence in the viral portion of the plasmid, and a heterologous sequence is inserted at the site of restriction digestion. The plasmid, containing a portion of the viral genome with an inserted heterologous sequence, is co-transformed, along with an adenoviral genome or a linearized plasmid containing a adenoviral genome, into a bacterial cell (such as, for example, E. coli), wherein the adenoviral genome can be a full-length genome or can contain one or more deletions. Homologous recombination between the plasmids generates a recombinant adenoviral genome containing inserted heterologous sequences.

[0080] Deletion of adenoviral subgroup B sequences, to provide a site for insertion of heterologous sequences or to provide additional capacity for insertion at a different site, can be accomplished by methods well-known to those of skill in the art. For example, for sequences cloned in a plasmid, digestion with one or more restriction enzymes (with at least one recognition sequence in the viral insert) followed by ligation will, in some cases, result in deletion of sequences between the restriction enzyme recognition sites. Alternatively, digestion at a single restriction enzyme recognition site within the viral insert, followed by exonuclease treatment, followed by ligation will result in deletion of viral sequences adjacent to the restriction site. A plasmid containing one or more portions of the adenoviral genome with one or more deletions, constructed as described above, can be co-transfected into a bacterial cell along with an adenoviral subgroup B genome (full-length or deleted) or a plasmid containing either a full-length or a deleted viral genome to generate, by homologous recombination, a plasmid containing a recombinant viral genome with a deletion at one or more specific sites. Subgroup B viruses containing the deletion can then be obtained by transfection of mammalian cells with the plasmid containing the recombinant viral genome.

[0081] In one embodiment of the invention, insertion sites can be adjacent to and downstream (in the transcriptional sense) of the adenoviral promoters. Locations of promoters, and restriction enzyme recognition sequences for use as insertion sites, can be easily determined by one of skill in the art from the subgroup B adenoviral nucleotide sequence provided herein. Alternatively, various in vitro techniques can be used for insertion of a restriction enzyme recognition sequence at a particular site, or for insertion of heterologous sequences at a site that does not contain a restriction enzyme recognition sequence. Such methods include, but are not limited to, oligonucleotide-mediated heteroduplex formation for insertion of one or more restriction enzyme recognition sequences (see, for example, Zoller et al. (1982) Nucleic Acids Res. 10:6487-6500; Brennan et al. (1990) Roux's Arch. Dev. Biol. 199:89-96; and Kunkel et al. (1987) Meth., Enzymology 154:367-382) and PCR-mediated methods for insertion of longer sequences. See, for example, Zheng et al. (1994) Virus Research 31:163-186.

[0082] It is also possible to obtain expression of a heterologous sequence inserted at a site that is not downstream from an adenoviral subgroup B promoter, if the heterologous sequence additionally comprises transcriptional regulatory sequences that are active in eukaryotic cells.

[0083] The invention also provides adenoviral subgroup B regulatory sequences which can be used to regulate the expression of heterologous genes. A regulatory sequence can be, for example, a transcriptional regulatory sequence, a promoter, an enhancer, an upstream regulatory domain, a splicing signal, a polyadenylation signal, a transcriptional termination sequence, a translational regulatory sequence, a ribosome binding site and a translational termination sequence.

[0084] In another embodiment, the invention identifies and provides additional regions of the subgroup B adenoviral genomes (and fragments thereof) suitable for insertion of heterologous or homologous nucleotide sequences encoding foreign genes or fragments thereof to generate viral recombinants. In another embodiment, the clone subgroup B adenoviral genomes can be propagated as a plasmid and infectious virus can be rescued from plasmid-containing cells.

[0085] The presence of adenoviral nucleic acids can be detected by techniques known to one of skill in the art including, but not limited to, hybridization assays, polymerase chain reaction, and other types of amplification reactions. Similarly, methods for detection of proteins are well-known to those of skill in the art and include, but are not limited to, various types of immunoassay, ELISA, Western blotting, enzymatic assay, immunohistochemistry, etc. Various foreign genes or nucleotide sequences or coding sequences (prokaryotic, and eukaryotic) can be inserted in the adenovirus nucleotide sequences, e.g., DNA, in accordance with the present invention. An heterogenous nucleotide sequence can consist of one or more gene(s) of interest, and preferably of therapeutic interest. In the context of the present invention, a gene of interest can code either for cytokines, such as interferons and interleukins; lymphokines; negative selection agents (e.g. thymidine kinases), membrane receptors such as the receptors recognized by pathogenic organisms (viruses, bacteria or parasites), preferably by the HIV virus (human immunodeficiency virus); or genes coding for growth factors. This list is not restrictive, and other genes of interest may be used in the context of the present invention.

[0086] A gene of interest can be of genomic type, of complementary DNA (cDNA) type or of mixed type (minigene, in which at least one intron is deleted). It can code for a mature protein, a precursor of a mature protein, in particular a precursor intended to he secreted and accordingly comprising a signal peptide, a chimeric protein originating from the fusion of sequences of diverse origins, or a mutant of a natural protein displaying improved or modified biological properties. Such a mutant may be obtained by, deletion, substitution and/or addition of one or more nucleotide(s) of the gene coding for the natural protein, or any other type of change in the sequence encoding the natural protein, such as, for example, transposition or inversion.

[0087] A gene of interest may be placed under the control of elements (DNA control sequences) suitable for its expression in a host cell. Suitable DNA control sequences are understood to mean the set of elements needed for transcription of a gene into RNA (antisense RNA or mRNA) and for the translation of an mRNA into protein. Among the elements needed for transcription, the promoter assumes special importance. It can be a constitutive promoter or a regulatable promoter, and can he isolated from any gene of eukaryotic, prokaryotic or viral origin, and even adenoviral origin. Alternatively, it can be the natural promoter of the gene of interest. Generally speaking, a promoter used in the present invention may be modified so as to contain regulatory sequences. A variety of promoters may be used, including the HSV-1 TK (herpesvirus type 1 thymidine kinase) gene promoter, the adenoviral MLP (major late promoter), in particular of human adenovirus type 2, the RSV (Rous Sarcoma Virus) LTR (long terminal repeat), the CMV (Cytomegalovirus) early promoter, and the PGK (phosphoglycerate kinase) gene promoter, for example, permitting expression in a large number of cell types.

[0088] A promoter that can be advantagously applied to regulate the replication of subgroup B adenovirus recombinants, or the expression of genes therefrom, is an E2F promoter as described in U.S. patent application Ser. No. 09/714,409, or EPA 1230378.

[0089] Targeting of a recombinant subgroup B adenoviral vector to a particular cell type can be achieved by constructing recombinant hexon and/or fiber genes. The protein products of these genes are involved in host cell recognition; therefore, the genes can be modified to contain peptide sequences that will allow the virus to recognize alternative host cells.

[0090] It is also possible that only fragments of nucleotide sequences of genes can be used (where these are sufficient to generate a protective immune response or a specific biological effect) rather than the complete sequence as found in the wild-type organism. Where available, synthetic genes or fragments thereof can also be used. However, the present invention can be used with a wide variety of genes, fragments and the like, and is not limited to those set out above.

[0091] In some cases the gene for a particular antigen can contain a large number of introns or can be from an RNA virus, in these cases a complementary DNA copy (cDNA) can be used.

[0092] In order for successful expression of the gene to occur, it can be inserted into an expression vector together with a suitable promoter including enhancer elements and polyadenylation sequences. A number of eucaryotic promoter and polyadenylation sequences which provide successful expression of foreign genes in mammalian cells and how to construct expression cassettes, are known in the art, for example in U.S. Pat. No. 5,151,267, the disclosures of which are incorporated herein by reference. The promoter is selected to give optimal expression of immunogenic protein which in turn satisfactorily leads to humoral, cell mediated and mucosal immune responses according to known criteria.

[0093] The present invention also includes pharmaceutical compositions comprising a therapeutically effective amount of a recombinant human adenoviral subgroup B virus or vector derived therefrom prepared according to the methods of the invention, in combination with a pharmaceutically acceptable vehicle and/or an adjuvant. Such a pharmaceutical composition can be prepared and dosages determined according to techniques that are well-known in the art. The pharmaceutical compositions of the invention can be administered by any known administration route including, but not limited to, systemically (for example, intravenously, intratracheally, intravascularly, intrapulmonarilly, intraperitoneally, intranasally, parenterally, enterically, intramuscularly, subcutaneously, intratumorally or intracranially) or by aerosolization or intrapulmonary instillation. Administration can take place in a single dose or in doses repeated one or more times after certain time intervals. The appropriate administration route and dosage will vary in accordance with the situation (for example, the individual being treated, the disorder to be treated or the gene or polypeptide of interest), but can be determined by one of skill in the art.

[0094] In another embodiment of the invention, E1 function (or the function of other viral regions which may be mutated or deleted in any particular viral vector) can be supplied (to provide a complementing cell line) by co-infection of cells with a virus which expresses the function that the vector lacks.

[0095] The invention also includes an expression system comprising a subgroup B adenovirus expression vector wherein a heterologous nucleotide sequence, e.g. DNA, replaces part or all of the E3 region, part or all of the E1 or E1B regions, part or all of the E2 region, part or all of the E4 region, part or all of the region between E4 and the right end of the genome, part or all of the late regions (L1-L7) and/or part or all of the regions occupied by penton genes. The expression system can be used wherein the foreign nucleotide sequences, e.g. DNA, is with or without the control of any other heterologous promoter.

[0096] The practice of the present invention in regard to gene therapy in humans is intended for the prevention or treatment of diseases including, but not limited to cancers, cardiovascular diseases, and the like. As applied to the treatement of cancer, the adenoviral vectors can be combined with chemotherapy. For the purposes of the present invention, the vectors, cells and viral particles prepared by the methods of the invention may be introduced into a subject either ex vivo, (i.e., in a cell or cells removed from the patient) or directly in vivo into the body to be treated. Preferably, the host cell is a human cell and, more preferably, is a lung, fibroblast, muscle, liver or lymphocytic cell or a cell of the hematopoietic lineage.

[0097] Adenoviruses of the invention may be formulated for therapeutic and diagnostic administration to a patient. For therapeutic or prophylactic uses, a sterile composition containing a pharmacologically effective dosage of adenovirus is administered to a human patient or veterinary non-human patient for treatment, for example, of a neoplastic condition. Generally, the composition will comprise about 10³ to 10¹⁵ or more adenovirus particles in an aqueous suspension. A pharmaceutically acceptable carrier or excipient is often employed in such sterile compositions. A variety of aqueous solutions can be used, e.g., water, buffered water, 0.4% saline, 0.3% glycine and the like. These solutions are sterile and generally free of particulate matter other than the desired adenoviral vector. The compositions may contain pharmaceutically acceptable auxiliary substances as required to approximate physiological conditions such as pH adjusting and buffering agents, toxicity adjusting agents and the like, for example sodium acetate, sodium chloride, potassium chloride, calcium chloride, sodium lactate, etc. Excipients which enhance infection of cells by adenovirus may be included.

[0098] Subgroup B adenoviruses of the invention, or the DNA contained therein, may also be delivered to neoplastic cells by liposome or immunoliposome delivery; such delivery may be selectively targeted to neoplastic cells on the basis of a cell surface property present on the neoplastic cell population (e.g., the presence of a cell surface protein which binds an immunoglobulin in an immunoliposome). Typically, an aqueous suspension containing the virions are encapsulated in liposomes or immunoliposomes. For example, a suspension of adenovirus virions can be encapsulated in micelles to form immunoliposomes by conventional methods (U.S. Pat. No. 5,043,164, U.S. Pat. No. 4,957,735, U.S. Pat. No. 4,925,661; Connor and Huang (1985) J. Cell Biol. 101: 582; Lasic DD (1992) Nature 355: 279; Novel Drug Delivery (eds. Prescott LF and Nimmo WS: Wiley, New York, 1989); Reddy et al. (1992) J. Immunol. 148: page 1585). Immunoliposomes comprising an antibody that binds specifically to a cancer cell antigen (e.g., CALLA, CEA) present on the cancer cells of the individual may be used to target virions, or virion DNA to those cells.

[0099] The compositions containing the present adenoviruses or cocktails thereof can be administered for therapeutic treatments of neoplastic disease. In therapeutic application, compositions are administered to a patient affected by the particular neoplastic disease, in an amount sufficient to cure or at least partially arrest the condition and its complications. An amount adequate to accomplish this is defined as a “therapeutically effective dose” or “efficacious dose.” Amounts effective for this use will depend upon the severity of the condition, the general state of the patient, and the route of administration.

[0100] Described below are examples of the present invention. These examples are provided only for illustrative purposes and are not intended to limit the scope of the present invention in any way. In light of the present disclosure, numerous embodiments within the scope of the claims will be apparent to those of ordinary skill in the art. The contents of the references cited in the specification are incorporated by reference herein.

### EXAMPLES

### Example 1

### Adenovirus 3 and 34 Genomic Sequences

[0101] Human subgroup B adenovirus types 3 and 34 (hereinafter also referred to as Ad3 or Ad 34, respectively) were obtained from the American Type Culture Collection (ATCC). The viruses were propagated in A549 cells, also available from the ATCC, and using standard infection and growth techniques. Both viruses were purified by cesium chloride gradient banding centrifugation.

[0102] Viral DNA was obtained from cesium chloride gradient-banded virus particles by lysing the virus particles in a solution consisting of: 10 mM Tris-HCl (pH8.0), SM EDTA, 0.6% SDS and 1.5 mg per ml of pronase (Sigma Corporation). The solution was at 37° C. Lysed particles were extracted twice with phenol/chloroform, and viral DNA was precipitated with ethanol. Purified viral DNAs were dissolved in distilled water and used for DNA sequencing.

[0103] Next, viral DNAs were subjected to limited digestion with Sau 3AI, followed by resolving the digested DNAs in a 1% agarose gel. Fragments between 0.8 kb and 1.2 kb in size were purified using a commercial DNA gel extraction kit (Qiagen Corporation), and subsequently cloned in Bam HI digested vector, pGem-7zf(+) (Promega Corporation).

[0104] Two hundred individual clones were sequenced using an automated sequencer, CEQ20000XL (Beckman), and using standard T7 and SP6 Sequencing primers. Contigs were constructed using SeqMan Software (DNAStar Inc.). Based on the constructed sequences, oligonucleotides were synthesized and primer walking was performed until all contiges were joined. Most regions were covered by at least 2 independent sequencings.

### Example 2

### Construction of E1B 55K Deleted Virus on Ad34 Backbone

[0105] Plasmid Construction

[0106] Vectors based on pGEM (Promega Corp.) were modified and used to clone, subclone the relevant nucleotide sequences. Plasmid construction was based on the fact that there is a unique NheI restriction site in the Ad34 genome at 6.5 KB from the left end. Plasmid construction began with the digest of the Ad34 genome (15 ug) with HindIII. Two fragments sized 2.2 Kb and 3.4 Kb were isolated on a 1% agarose gel and purified using Bio 101 Gene Clean Kit. The 2.2 Kb fragment was ligated into pGEM-7Z (Promega), that had been previously digested with HindIII. The construct was evaluated for the correct fragment and orientation by restriction mapping. This construct was called 2.2/pGEM-7Z. Next, the HindIII site near the NheI site in the 2.2/pGEM7Z construct was removed by digesting with NheI and ClaI, then filling in with Klenow and re-ligating. The first 1.4 Kb of the Ad34 genome, was generated by PCR (U.S. Pat. No. 4,683,202)

[0107] using PCR primers PO₄ Fwd (5′CATGAGCTCGCGGCCGCCATCATCAATAATATACCTTATAGA-3′) and Ad34-1370B (5′GGCTTAAGCTTCACAGGAA-3′), 1 ng genomic template DNA and Pfu DNA Polymerase (Stratagene). The PCR product was purified using QIAquick PCR Purification kit (QIAGEN), digested with SacI and HindIII, isolated on 1% agarose gel and purified with Bio 101 Gene Clean Kit. Purified 1.4 Kb fragments were ligated to the 2.2/pGEM-7Z that had been digested with SacI and HindIII, to create the 1.4/2.2/pGEM-7Z construct. The 3.4 Kb fragment was ligated into pGEM-9Z (Promega), that had been previously digested with HindIII. The construct was evaluated for the correct fragment and orientation by restriction mapping. As the E1B19K and E1B55K genes overlap, inactivation of the E1B55K gene was achieved by introducing a stop codon following the start site of E1B55K and a deletion of the sequence between the end of the E1B19K end and the rest of the E1B55K gene. The deleted region was replaced with a PmeI site. The mutagenesis of the E1B55K was performed using a two step PCR process with the 3.4/pGEM9Z construct. The product from the first step of the PCR was generated using PCR primers P02 fwd (5′-CCCTCCAGTGGAGGAGGCGGAGTAGGTTTAAACGGTGAGTATTGGGAAAAC TTGGGGT-3′), PO₃ Rev (5′-TAGCATAGGTCAGCGTTGAAGAAT-3′), 10ng 3.4/pGEM-9Z template DNA and Faststart DNA Polymerase (Roche). The second PCR step was generated using the PCR Primers P01 fwd (5′-ATAAATGGATCCCGCAGACTCATTTTAGCAGGGGATACGTTTTGGATTTCG-3′) and the product from the first PCR reaction, 10 ng 3.4/pGEM9Z template DNA and Faststart DNA Polymerase (Roche). The PCR product was purified using a QIAquick PCR Purification Kit (QIAGEN), digested with BsmBI and BamHI, isolated on a 2% agarose gel and purified with Bio101 GeneClean. The purified E1B55K deleted fragment was ligated into 3.4/pGEM9Z that had been previously digested with BsmBI and BamHI, to generate 3.4Δ55K/pGEM-9Z. To assemble the 1.4 Kb, 2.2 Kb fragment and the 3.4Δ55K fragment, the 3.4Δ55K/pGEM-9Z construct was digested with HindIII, the 3.4Δ55K fragment was isolated on a 1% agarose gel and purified with Bio 101 Gene Clean Kit. Purified 3.4Δ55K fragments were ligated into the 1.4/2.2/pGEM-7Z construct that had been digested with HindIII and treated with CIP to create the shuttle vector, SV13.

[0108] After sequencing the shuttle vector, SV13, it was discovered that there was a single point mutation in the 1.4 KB fragment, caused by an error in the PCR. To correct this error, a new 1.4 KB PCR product was generated using the same PCR conditions with the exception that a proofreading DNA polymerase (pfu from Stratagene) was used. Purified 1.4 Kb fragments were ligated to the SV13 shuttle vector that had been digested with NotI and BmgBI to generate the shuttle vector, SV2-5. This construct was verified by sequencing.

[0109] Virus Construction and Isolation

[0110] Subgroup B adenovirus type 34 (Ad34) (ATCC) TP DNA was made as described by S. Miyake, et. al. (PNAS 1996). To construct the Ad34AE1B55K virus, the SV2-5 construct was digested with NotI and NheI (8.5 ug), isolated on a 1% agarose gel and purified with QIAquick Gel Purification Kit (QIAGEN). 5 ug of this fragment was then ligated O/N at RT to 0.25 ug AD34-TP DNA that had been digested with NheI at 37° C. for 6 hours. The ligation mixture was transfected into HEK293 cells in DMEM supplemented with 2% FBS media in 60 mm dishes using the Mammalian Transfection Kit (Stratagene) as per the manufacturer's protocols. The transfection was incubated O/N at 37° C./3% CO₂ for 24 hours. Transfections were stopped after 24 hours by removing the media and replacing it with DMEM supplemented with 2% FBS, 2% L-Glutameine, 1% PS which were then incubated for 24 hours at 37° C./5% CO₂. The cells were overlaid with DMEM infection media containing 2% FBS, 2% L-Glutamine, 1% NEAA, 1% PS and 1.5% SeaPlaque agarose and fed every 2-3 days with fresh overlay media. Plaques were isolated, propagated on HEK293 cells and viral DNA was isolated using the QIAamp DNA Blood Kit (QIAGEN) as per the manufacturer's recommendations. Viruses were screened by PCR for the E1B55K deleted region using the following primers: SVfwd05(5′-GGAAGACCTTAGAAAGACTAGGC-3′) and PO₃ Rev(5′-TAGCATAGGTCAGCGTTGAAGAAT-3′) PCR was performed using Faststart DNA Polymerase (Roche) under the following cycling conditions: 1 cycle at 94° C. for 5 min, 25-30 cycles at 94° C. for 30 sec, 55° C. for 30 sec, and 72° C. for 30 sec-90 sec, and 1 cycle at 72° C. for 7 min and finally 4° C. indefinitely. Positive plaques were purified 4 rounds on 293/E4 cells (Microbix Biosystems Inc.). All virus isolates were screened by PCR for the E1B55K deletion and for internal Ad34 wildtype E1B55K sequence with primers: 3.4fwd03 (5′-GGGATGAAGTTTCTGTATTGC-3′) and 3.4rev12 (5′-GTCACATCTACACACACCGG-3′).

[0111] Ad34ΔE1B55K virus, the shuttle vector, SV2-5, are on deposit with the American Type Culture Collection with Accession Numbers ______ and ______, respectively.

[0112] Although the present invention has been described in some detail by way of illustration for purposes of clarity of understanding, it will be apparent that certain changes and modifications may be practiced within the scope of the claims.

1. A method for ablating neoplastic cells in a cell population, comprising the steps of:
contacting under infective conditions (1) a recombinant replication deficient subgroup B adenovirus lacking an expressed viral oncoprotein capable of binding a functional tumor suppressor gene product, with (2) a cell population comprising non-neoplastic cells containing said functional tumor suppressor gene product which forms a bound complex with a viral oncoprotein and neoplastic cells lacking said functional tumor suppressor gene product, thereby generating an infected cell population.

2. A method as described in claim 1 wherein said tumor suppressor is p53, or pRb.

3. A method according to claim 2, wherein said viral oncoprotein comprises an adenovirus E1b or E1A polypeptide.

4. A method as described in claim 3, wherein said subgroup B adenovirus is selected from the group consisting of types 3 or 34.

5. A method of treating a patient's cancer, comprsing the steps of administering to said patient a recombinant replication deficient subgroup B adenovirus lacking an expressed adenoviral oncoprotein capable of binding a functional tumor suppressor gene product.

6. A method as described in claim 5, wherein said subgroup B adenovirus is selected from the group consisting of types 3 or 34.

7. A method as described in claim 6, wherein said adenoviral oncoprotein comprises an E1b or E1A polypeptide.

8. A recombinant human adenovirus subgroup B type 3, comprising the nucleotide seqeunce shown in FIG. 1

9. A nucleotide sequence that hybridizes under stringent conditions to the nucleotide sequence shown in FIG. 1.

10. A recombinant human adenovirus subgroup B type 34, comprising the nucleotide seqeunce shown in FIG. 2

11. A nucleotide sequence that hybridizes under stringent conditions to the nucleotide sequence shown in FIG. 2.

12. A recombinant human adenovirus subgroup B type 3 as described in claim 8, comprising a mutation in the E1A and/or E1B regions that encode oncoproteins that bind pRb or p53, respectively, said mutation reducing or eliminating binding of said oncoproteins to pRb or p53, respectively.

13. A recombinant human adenovirus as described in claim 12, wherein said mutation is a deletion or point mutation.

14. A recombinant human adenovirus subgroup B type 34 as described in claim 10, comprising a mutation in the E1A and/or E1B regions that encode oncoproteins that bind pRb or p53, respectively, said mutation reducing or eliminating binding of said oncoproteins to pRb or p53, respectively.

15. A recombinant human adenovirus as described in claim 14, wherein said mutation is a deletion or point mutation.

16. The nucleotide sequences shown in FIG. 1 or 2, comprising the regions that encode the E1B 55K protein, or nucleotide sequences that hybridize to said sequences under stringent conditions.

17. The E1B 55K protein encoded by the nucleotide sequences shown in FIG. 1 or 2, or proteins encoded by nucleotide sequences that hybridize to said sequences under stringent conditions.

The application's sequence listing, which the Patent Office published only in electronic form, follows.

SEQUENCE LISTING (7 sequences)

SEQ ID NO: 1 - protein, 35823 aa, Homo sapiens
ATCTATATAATATACCTTATAGATGGAATGGTGCCAACATGTAAATGAGGTAATTTAAAAAAGTGCGCGCTGTGTGGTGATTGGCTGCGGGGTTAACGGCTAAAAGGGGCGGCGCGACCGTGGGAAAATGACGTGACTTATGTGGGAGGAGTTATGTTGCAAGTTATTACGGTAAATGTGACGTAAAACGAGGTGTGGTTTGAACACGGAAGTAGACAGTTTTCCCACGCTTACTGACAGGATATGAGGTAGTTTTGGGCGGATGCAAGTGAAAATTCTCCATTTTCGCGCGAAAACTAAATGAGGAAGTGAATTTCTGAGTCATTTCGCGGTTATGCCAGGGTGGAGTATTTGCCGAGGGCCGAGTAGACTTTGACCGTTTACGTGGAGGTTTCGATTACCGTGTTTTTCACCTAAATTTCCGCGTACGGTGTCAAAGTTCTGTGTTTTTACGTAGGTGTCAGCTGATCGCTAGGGTATTTAAACCTGACGAGTTCCGTCAAGAGGCCACTCTTGAGTGCCAGCGAGAAGAGTTTTCTCCTCCGCGCCGCAAGTCAGTTCTGCGCTTTGAAAATGAGACACCTGCGCTTCCTGCCACAGGAGGTTATCTCCAGTGAGACCGGGATCGAAATACTGGAGTTTGTGGTAAATACCCTAATGGGAGACGACCCGGAACCGCCAGTGCAGCCTTTCGATCCACCTACGCTGCACGATCTGTATGATTTAGAGATAGACGGGCCGGAGGATCCCAATGAGGAAGCTGTGAATGGGTTTTTTACTGATTCTATGCTGCTAGCTGCTGATGAAGGATTGGACATAAACCCTCCTCCTGAGACACTTGTTACCCCAGGGGTGGTTGTGGAAAGCGGCATAGGTGGGAAAAAATTGCCTGATCTGGGAGCAGCTGAAATGGACTTGCGTTGTTATGAAGAGGGTTTTCCTCCCAGTGATGATGAAGATGGGGAAACTGAGCAGTCCATCCATACCGCAGTAAATGAGGGAGTAAAAGCTGCCAGCGATGTTTTTAAGTTGGACTGTCCGGAGCTGCCTGGACATGGCTGTAAGTCTTGTGAATTTCACAGGAATAACACTGGAATGAAAGAACTATTGTGCTCGCTTTGCTATATGAGAATGCACTGCCACTTTATTTACAGTAAGTGTATTTAAGTGAAATTTAAAGGAATAGTGTAGCTATTTAATAACTGTTGAATGGTAGATTTATGTTTTTTTCTTGCGATTTTTTGTAGGTCCTGTGTCTGATGATGAGTCACCTTCTCCTGATTCAACTACCTCACCTCCTGAAATTCAGGCGCCCGCACCTGCAAACGTATGCAAGCCCATTCCTGTGAAGCCTAAGCCTGGGAAACGCCCTGCTGTGGATAAGCTTGAGGACTTGTTGGAGGGTGGGGATGGACCTTTGGACCTTAGTACCCGGAAACTGCCAAGGCAATGAGTGCCCTGCAGCTGTGTTTATTTAATGTGACGTCATGTAATAAAATTATGTCAGCTGCTGAGTGTTTTATTACTTCTTGGGTGGGGACTTGGATATATAAGTAGGAGCAGATCTGTGTGGTTAGCTCACAGCAACCTGCTGCCATCCATGGAGGTTTGGGCTATCTTGGAAGACCTCAGACAGACTAAGCTACTGCTAGAAAACGCCTCGGACGGAGTCTCTGGCCTTTGGAGATTCTGGTTCGGTGGTGATCTAGCTAGGCTAGTGTTTAGGATAAAACAGGACTACAGGGAAGAATTTGAAAAGTTATTGGACGATAGTCCGGGACTTTTTGAAGCTCTTAACTTGGGTCATCAGGCTCATTTTAAGGAGAAGGTTTTATCAGTTMDPPNTTAGATTTTTCTACTCCTGGTAGAACTGCTGCTGCTGTAGCTTTTCTTACTTTTATATTGGATAAATGGATCCGCCAAACSLQQGIRFGFHSSSFVENMEGSQDEDNTCACTTCAGCAAGGGATACGTTTTGGATTTCATAGCAGCAGCTTTGTGGAGAACATGGAAGGCTCGCAGGATGAGGACAALRLLASAASGSSRDTETPTDHASGSATCTTAGATTACTGGCCAGTGCAGCCTCTGGGAGTAGCAGGGATACTGAGACACCCACCGACCATGCCAGCGGTTCTGCAGGGAAGGQSESRPGPSGGGVADLFPELRGAGGAGCAGCAGGAGGACAATCCGAGAGCCGGCCTGGACCCTCCGGTGGAGGAGTAGCTGACCTGTTTCCTGAACTGCGARVLTRSTTSGQNRGIKRERNPSGNNSRCGGGTGCTTACTAGGTCTACGACCAGTGGACAGAACAGGGGAATTAAGAGGGAGAGGAATCCTAGTGGGAATAATTCAAGTELALSLMSRRRPETVWWHEVQSEGRAACCGAGTTGGCTTTAAGTTTAATGAGCCGCAGGCGTCCTGAAACTGTTTGGTGGCATGAGGTTCAGAGCGAAGGCAGGGDEVSILQEKYSLEQLKTCWLEPEDDWEATGAAGTTTCAATATTGCAGGAGAAATATTCACTAGAACAACTTAAGACCTGTTGGTTGGAACCTGAGGATGATTGGGAGVAIRNYAKISLRPDKQYRITKKINIRNGTGGCCATTAGGAATTATGCTAAGATATCTCTGAGGCCTGATAAACAATATAGAATTACTAAGAAGATTAATATTAGAAAACYISGNGAEVIIDTQDKAVFRCCMMTGCATGCTACATATCAGGGAATGGGGCAGAGGTTATAATAGATACACAAGATAAAGCAGTTTTTAGATGTTGTATGATGGGMWPGVVGMEAVTLMNIRFKGDGYNGIGTATGTGGCCAGGGGTTGTCGGCATGGAAGCAGTAACACTTATGAATATTAGGTTTAAAGGGGATGGGTATAATGGCATTVFMANTKLILHGCSFFGFNNTCVEAWGGTATTTATGGCTAACACTAAGCTGATTCTACATGGTTGTAGCTTTTTTGGGTTTAATAATACGTGTGTAGAAGCTTGGGGQVSVRGCSFYACWIATSGRVKSQLSVGCAAGTTAGTGTGAGGGGTTGTAGTTTTTATGCATGCTGGATTGCAACATCAGGTAGGGTCAAGAGTCAGTTGTCTGTGAKKCMFERCNLGILNEGEARVRHCAATEAGAAATGCATGTTTGAGAGATGTAATCTTGGCATACTGAATGAAGGTGAAGCAAGGGTCCGCCACTGCGCAGCTACAGAATGCFILIKGNASVKHNMICGHSDERPYACTGGCTGCTTCATTCTAATAAAGGGAAATGCCAGTGTGAAGCATAATATGATCTGTGGACATTCGGATGAGAGGCCTTAQMLTCAGGHCNILATVHIVSHARKKWTCAGATGCTGACCTGCGCTGGTGGACATTGCAATATTCTTGCTACCGTGCATATCGTTTCACATGCACGCAAAAAATGGCPVFEHNVITKCTMHIGGRRGMFMPYQCCTGTATTTGAACATAATGTGATTACCAAGTGCACCATGCACATAGGTGGTCGCAGGGGAATGTTTATGCCTTACCAGTGTNMNHVKVMLEPDAFSRVSLTGIFDMNIAACATGAATCATGTGAAGGTAATGTTGGAACCAGATGCCTTTTCCAGAGTGAGCTTAACAGGAATCTTTGATATGAATATQLWKILRYDDTKPRVRACECGGKHARTCAACTATGGAAGATCCTGAGATATGATGACACTAAACCAAGGGTGCGCGCATGCGAATGCGGAGGCAAGCATGCTAGATFQPVCVDVTEDLRPDHLVLACTGAEFGTCCAGCCGGTGTGCGTGGATGTGACTGAAGACTTGAGACCCGATCATTTGGTGCTTGCCTGCACTGGAGCGGAGTTCGGTSSGEETDTCTAGTGGTGAAGAAACTGACTAAAGTGAGTAGTGGGGCAAGATGTGGATGGGGACTTTCAGGTTGGTAAGGTGGGCAGATTGGGTAAATTTTGTTAATTTCTGTCTTGCAGCTGCCATGAGTGGAAGCGCTTCTTTTGAGGGGGGAGTATTTAGCCCTTATCTGACGGGCAGGCTCCCACCATGGGCAGGAGTTCGTCAGAATGTCATGGGATCCACTGTGGATGGGAGACCCGTCCAGCCCGCCAATTCCTCAACGCTGACCTATGCCACTTTGAGTTCGTCACCATTGGATGCAGCTGCAGCCGCCGCCGCTACTGCTGCCGCCAACACCATCCTTGGAATGGGCTATTATGGAAGCATCGTTGCCAATTCCAGTTCCTCTAATAACCCTTCAACCCTGGCTGAGGACAAGCTACTTGTTCTCTTGGCGCAGCTCGAGGCCTTAACCCAACGCTTAGGCGAACTGTCTAAGCAGGTGGCCCAGTTGCGTGAGCAAACTGAGTCTGCTGTTGCCACAGCAAAGTCTAAATAAAGATCTCAAATCAATAAATAAAGAAATACTTGATATAAAACAAATGAATGTTTATTTGATTTTTCGCGCGCGGTATGCCCTGGACCATCGGTCTCGATCATTGAGAACGCGGTGGATCTTTTCCAGTACCCTGTAAAGGTGGGATTGAATGTTTAGATACATGGGCATTAGTCCGTCTCGGGGGTGGAGATAGCTCCATTGAAGAGCCTCTTGCTCCGGGGTAGTGTTATAAATCACCCAGTCATAGCAAGGTCGGAGTGCATGGTGTTGCACAATATCTTTTAGGAGCAGACTAATTGCAACGGGGAGGCCCTTAGTGTAGGTGTTTACAAATCTGTTGAGCTGGGACGGGTGCATCCGGGGTGAAATTATATGCATTTTGGACTGGATCTTGAGGTTGGCAATGTTGCCGCCTAGATCCCGTCTCGGGTTCATATTGTGCAGGACCACCAAGACAGTGTATCCGGTGCACTTGGGAAATTTATCATGCAGCTTAGAGGGAAAAGCATGAAAAAATTTGGAGACGCCTTTGTGACCCCCCAGATTCTCCATGCACTCATCCATAATGATAGCGATGGGGCCGTGGGCAGCGGCACGGGCGAACACGTTCCGGGGGTCTGAACATCATAGTTATGCTCCTGAGTCAGGTCATCATAAGCCATTTTAATAAACTTTGGGCGGAGGGTGCCAGATTGGGGGATGAAAGTTCCCTCTGGCCGGGAGCATAGTTTCCCTCACATATTTGCATTTCCCAGGCTTTCAGTTCAGAGGGGGGGATCATGTCCACCTGCGGGGCTATAAAAAATACCGTTTCTGGAGCCGGGGTGATTAACTGGGACGAGAGCAAATTCCTAAGCAGCTGAGACTTGCCGCACCCAGTGGGACCGTAAATGACCCCAATTACGGGTTGCAGATGGTAGTTTAGGGAACGACAGCTGCCGTCCTCCCGGAGCAGGGGGGCCACTTCGTTCATCATTTCCCTTACATGGATATTTTCCCGCACCAAGTCCGTTAGGAGGCGCTCTCCCCCAAGGGATAGAAGCTCCTGGAGCGAGGAGAAGTTTTTCAGCGGCTTCAGCCCGTCAGCCATGGGCATTTTGGAAAGAGTCTGTTGCAAGAGCTCGAGCCGGTCCCAGAGCTCGGTGATGTGCTCTATGGCATCTCGATCCAGCAGACCTCCTCGTTTCGCGGGTTGGGACGGCTCCTGGAGTAGGGAATCAGACGATGGGCGTCCAGCGCTGCCAGGGTCCGATCCTTCCATGGTCGCAGCGTCCGAGTCAGGGTTGTTTCCGTCACGGTGAAGGGGTGCGCGCCTGGTTGGGCGCTTGCGAGGGTGCGCTTCAGACTCATCCTGCTGGTCGAGAACCGCTGCCGATTGGCGCCCTGCATGTCGGCCAGGTAGCAGTTTACCATGAGTTCGTAGTTGAGCGCCTCGGCCGCGTGGCCTTTGGCACGGAGCTTACCTTTGGAAGTTTTATGGCAGGCGGGGCAGTAGATACATTTGAGGGCATACAACTTGGGCGCGAGGAAAATGGATTCGGGGGAGTATGCATCCGCACCGCAGGAGGCGCAGACGGTTTCGCACTCCACGAGCCAGGTCAGATCCGGCTCATCGGGGTCAAAAACAAGTTTTCCGCCATGTTTTTTGATGCGTTTCTTACCTTTGGTTTCCATGAGTTCGTGTCCCCGCTGGGTGACAAAGAGGCTGTCCGTGTCCCCGTAGACCGACTTTATGGGCCTGTCCTCGAGCGGAGTGCCTCGGTCCTCTTCGTAGAGGAACCCAGCCCACTCTGATACAAAAGCGCGTGTCCAGGCCAGCACAAAGGAGGCCACGTGGGAGGGGTAGCGGTCGTTGTCAACCAGGGGGTCCACCTTCTCTACGGTATGTAAACACATGTCCCCCTCCTCCACATCCAAGAATGTGATTGGCTTGTAAGTGTAGGCCACGTGACCAGGGGTCCCCGCCGGGGGGGTATAAAAGGGGGCGGGCCTCTGTTCGTCCTCACTGTCTTCCGGATCGCTGTCCAGGAGCGCCAGCTGTTGGGGTAGGTATTCCCTCTCGAAGGCGGGCATGACCTCTGCACTCAGGTTGTCAGTTTCTAGGAACGAGGAGGATTTGATATTGACAGTACCAGCAGAGATGCCTTTCATAAGACTCTCGTCCATCTGGTCAGAAAACACAATCTTCTTGTTGTCCAGCTTGGTGGCAAATGATCCATAGAGGGCATTGGATAGAAGCTTGGCGATGGAGCGCATGGTTTGGTTCTTTTCCTTGTCCGCGCGCTCCTTGGCGGTGATGTTAAGCTGGACGTACTCGCGCGCCACACATTTCCATTCAGGAAAGATGGTTGTCAGTTCATCCGGAACTATTCTGATTCGCCATCCCCTATTGTGCAGGGTTATCAGATCCACACTGGTGGCCACCTCGCCTCGGAGGGGCTCATTGGTCCAGCAGAGTCGACCTCCTTTTCTTGAACAGAAAGGGGGGAGGGGGTCTAGCATGAACTCATCAGGGGGGTCCGCATCTATGGTAAATATTCCCGGTAGCAAATCTTTGTCAAAATAGCTGATGGTGGCGGGATCATCCAAGGTCATCTGCCATTCTCGAACTGCCAGCGCGCGCTCATAGGGGTTAAGAGGGGTGCCCCAGGGCATGGGGTGGGTGAGCGCGGAGGCATACATGCCACAGATATCGTAGACATAGAGGGGCTCTTCGAGGATGCCGATGTAAGTGGGATAACATCGCCCCCCTCTGATGCTTGCTCGCACATAGTCATAGAGTTCATGTGAGGGGGCAAGAAGACCCGGGCCCAGATTGGTGCGGTTGGGTTTTTCCGCCCTGTAAACGATCTGGCGAAAGATGGCATGGGAATTGGAAGAGATAGTAGGTCTCTGGAATATGTTAAAATGGGCATGAGGTAAGCCTACAGAGTCCCTTATGAAGTGGGCATATGACTCTTGCAGCTTGGCTACCAGCTCGGCGGTGATGAGTACATCCAGGGCACAGTAGTCGAGAGTTTCCTGGATGATGTCATAACGCGGTTGGCTTTTCTTTTCCCACAGCTCGCGGTTGAGAAGGTATTCTTCGTGATCCTTCCAGTACTCTTCGAGGGGAACCCGTCTTTTTCTGCACGGTAAGAGCCCAACATGTAGAACTGATTGACTGCCTTGTAGGGACAGCATCCCTTCTCCACTGGGAGAGAGTATGCTTGGGCTGCATTGCGCAGCGAGGTATGAGTGAGGGCAAAAGTGTCCCTGACCATGACTTTGAGGAATTGATACTTGAAGTCGATGTCATCACAGGCCCCCTGTTCCCAGAGTTGGAAGTCCACCCGCTTCTTGTAGGCGGGGTTGGGCAAAGCGAAAGTAACATCATTGAAGAGGATCTTGCCGGCCCTGGGCATGAAATTTCGGGTGATTTTGAAAGGCTGAGGAACCTCTGCTCGGTTATTGATAACCTGAGCGGCCAAGACGATCTCATCAAAGCCATTGATGTTGTGCCCCACTATGTACAGTTCTAAGAATCGAGGGGTGCCCCTGACATGAGGCAGCTTCTTGAGTTCTTCAAAAGTGAGATCTGTAGGGTCAGTGAGAGCATAGTGTTCGAGGGCCCATTCGTGCACGTGAGGGTTCGCTTTAAGGAAGGAGGACCAGAGGTCCACTGCCAGTGCTGTTTGTAACTGGTCCCGGTACTGACGAAAATGCTGTCCGACTGCCATCTTTTCTGGGGTGACGCAATAGAAGGTTTGGGGGTCCTGCCGCCAGCGATCCCACTTGAGTTTTATGGCGAGGTCATAGGCGATGTTGACGAGCCGCTGGTCTCCAGAGAGTTTCATGACCAGCATGAAGGGGATTAGCTGCTTGCCAAAGGACCCCATCCAGGTGTAGGTTTCCACATCGTAGGTGAGAAAGAGCCTTTCTGTGCGAGGATGAGAGCCAATCGGGAAGAACTGGATCTCCTGCCACCAGTTGGAGGAATGGCTGTTGATGTGATGGAAGTAGAACTCCCTGCGACGCGCCGAGCATTCATGCTTGTGCTTGTACAGACGGCCGCAGTACTCGCAGCGATTCACGGGATGCACCTTATGAATGAGTTGTACCTGACTTCCTTTGACGAGAAATTTCAGTGGAAAATTGAGGCCTGGCGCTTGTACCTCGCGCTTTACTATGTTGTCTGCATCGGCATGACCATCTTCTGTCTCGATGGTGGTCATGCTGACGAGCCCTCGCGGGAGGCAAGTCCAGACCTCGGCGCGGCAGGGGCGGAGCTCGAGGACGAGAGCGCGCAGGCCGGAGCTGTCCAGGGTCCTGAGACGCTGCGGAGTCAGGTTAGTAGGCAGTGTCAGGAGATTAACTTGCATGATCTTTTGGAGGGCGTGAGGGAGGTTCAGATAGTACTTGATCTCAACGGGTCCGTTGGTGGAGATGTCGATGGCTTGCAGGGTTCCGTGTCCCTTGGGCGCTACCACCGTGCCCTTGTTTTTCATTTTGGACGGCGGTGGCTCTGTTGCTTCTTGCATGTTTAGAAGCGGTGTCGAGGGCGCGCACCGGGCGGCAGGGGCGGCTCGGGACCCGGCGGCATGGCTGGCAGTGGTACGTCGGCGCCGCGCGCGGGTAGGTTCTGGTACTGCGCCCTGAGAAGACTCGCATGCGCGACGACGCGGCGGTTGACATCCTGGATCTGACGCCTCTGGGTGAAAGCTACCGGCCCCGTGAGCTTGAACCTGAAAGAGAGTTCAACAGAATCAATCTCGGTATCGTTGACGGCGGCTTGCCTAAGGATTTCTTGCACGTCGCCAGAGTTGTCCTGGTAGGCGATCTCGGCCATGAACTGCTCGATCTCTTCCTCTTGAAGATCTCCGCGGCCCGCTCTCTCGACGGTGGCCGCGAGGTCGTTGGAGATGCGCCCAATGAGTTGAGAGAATGCATTCATGCCCGCCTCGTTCCAGACGCGGCTGTAGACCACAGCCCCCACGGGATCTCTCGCGCGCATGACCACCTGGGCGAGGTTGAGCTCCACGTGGCGGGTGAAGACCGCATAGTTGCATAGGCGCTGGAAAAGGTAGTTGAGTGTGGTGGCGATGTGCTCGGTGACGAAGAAATACATGATCCATCGTCTCAGCGGCATCTCGCTGACATCGCCCAGCGCTTCCAAGCGCTCCATGGCCTCGTAGAAGTCCACGGCAAAGTTAAAAAACTGGGAGTTACGCGCGGACACGGTCAACTCCTCTTCCAGAAGACGGATAAGTTCGGCGATGGTGGTGCGCACCTCGCGCTCGAAAGCCCCTGGGATTTCTTCCTCAATCTCTTCTTCTTCCACTAACATCTCTTCCTCTTCAGGTGGGGCTGCAGGAGGAGGGGGAACGCGGCGACGCCGGCGGCGCACGGGCAGACGGTCGATGAATCTTTCAATGACCTCTCCGCGGCGGCGGCGCATGGTCTCGGTGACGGCACGACCGTTCTCCCTGGGTCTCAGAGTGAAGACGCCTCCGCGCATCTCCCTGAAGTGGTGACTGGGAGGCTCTCCGTTGGGCAGGGACACCGCGCTGATTATGCATTTTATCAATTGCCCCGTAGGTACTCCGCGCAAGGACCTGATCGTCTCAAGATCCACGGGATCTGAAAACCTTTCGACGAAAGCGTCTAACCAGTCGCAATCGCAAGGTAGGCTGAGCACTGTTTCTTGCGGGCGGGGGCGGCTAGACGCTCGGTCGGGGTTCTCTCTTTCTTCTCCTTCCTCCTCTTGGGAGGGTGAGACGATGCTGCTGGTGATGAAATTAAAATAGGCAGTTTTGAGACGGCGGATGGTGGCGAGGAGCACCAGGTCTTTGGGTCCGGCTTGTTGGATACGCAGGCGATGAGCCATTCCCCAAGCATTATCCTGACATCTGGCCAGATCTTTATAGTAGTCTTGCATGAGTCGTTCCACGGGCACTTCTTCTTCGCCCGCTCTGCCATGCATGCGAGTGATCCCGAACCCGCGCATGGGCTGGACAAGTGCCAGGTCCGCTACAACCCTTTCGGCGAGGATGGCTTGCTGCACCTGGGTGAGGGTGGCTTGGAAGTCGTCAAAGTCCACGAAGCGGTGGTAGGCCCCGGTGTTGATTGTGTAGGAGCAGTTGGCCATGACTGACCAGTTGACTGTCTGGTGCCCAGGGCGCACGAGCTCGGTGTACTTGAGGCGCGAGTATGCGCGGGTGTCAAAGATGTAATCGTTGCAGGTGCGCACCAGGTACTGGTAGCCAATGAGAAAGTGTGGCGGTGGCTGGCGGTACAGGGGCCATCGCTCTGTAGCCGGGGCTCCGGGGGCGAGGTCTTCCAGCATGAGGCGGTGGTAGCCGTAGATGTACCTGGACATCCAGGTGATACCGGAGGCGGTGGTGGATGCACGTGGGAACTCGCGCACGCGGTTCCAGATGTTGCGCAGCGGCATGAAGTAGTTCATGGTAGGCACGGTCTGGCCAGTGAGGCGCGCGCAGTCATTGACGCTCTGTAGACACGGAGAAAACGAAAGCGATGAGCGGCTCGACTCCGTGGTCTGGGGGAACGTGAACGGGTTGGGTCGCGGTGTACCCCGGTTCGAGTCCAAAGCTAAGCGATCACGCTCGGATCGGCCGGAGCCGCGGCTAACGTGGTATTGGCTATCCCGTCTCGACCCAGCCGACGAATATCCAGGGTACGGAGTAGAGTCGTTTTTGCTGCTTTTTCCTGGACGTGTGCCATTGCCACGTCAAGCTTTAGAACGCTCAGTTCTCGGGCCGTGAGTGGCTCGCGCCCGTAGTCTGGAGAATCAGTCGCCAGGGTTGCGTTGCGGTATGCCCCGGTTGGAGCCTAAGCGCGGCTCGTATCGGCCGGTTTCCGCGACAAGCGAGGGTTTGGCAGCCCCGTTATTTCCAAGACCCCGCCAGCCGACTTCTCCAGTTTACGGGAGCGAGCCCTTTTTTTTTTTTTTTTGTTTTTGTCGCCCAGATGCATCCAGTGCTGCGACAGATGCGCCCCCAGCAACAGGCCCCTTCTCAGCAACAGCCACAAAAGGCTCTTCTTGCTCCTGCAACTACTGCAGCTGCAGCCGTGAGCGGCGCGGGACAGCCCGCCTATGATCTGGACTTGGAAGAGGGCGAGGGATTGGCGCGCCTGGGGGCTCCATCGCCCGAGCGGCACCCGCGGGTGCAACTAAAAAAGGACTCTCGCGAGGCGTACGTGCCCCAGCAGAACCTGTTCAGGGACAGGAGCGGCGAGGAGCCAGAGGAGATGCGAGCATCTCGATTTAACGCGGGTCGCGAGCTGCGCCACGGTCTGGATCGAAGACGGGTGCTGCAAGACGAGGATTTTGAGGTCGATGAAGTCACAGGGATCAGCCCAGCTAGGGCACATGTGGCCGCGGCCAACCTAGTCTCGGCCTACGAGCAGACCGTGAAGGAGGAGCGCAACTTCCAAAAATCTTTTAACAACCATGTGCGCACCCTGATCGCCCGCGAGGAAGTGACCCTGGGTCTGATGCATCTGTGGGACCTGATGGAGGCTATCGCCCAAAACCCCACTAGCAAACCACTGACAGCTCAGCTGTTTCTGGTGGTTCAACATAGCAGGGACAACGAGGCATTCAGGGAGGCGTTGTTGAACATCACCGAGCCTGATGGGAGATGGCTGTATGATCTGATCAACATCCTGCAAAGTATTATAGTGCAGGAACGTAGCCTGGGTTTGGCTGAGAAAGTGGCAGCTATCAACTACTCGGTCTTGAGCCTGGGCAAATACTACGCTCGCAAGATCTACAAGACCCCCTACGTACCCATAGACAAGGAGGTGAAGATAGATGGGTTTTACATGCGCATGACTCTGAAGGTGCTGACTCTGAGCGACGATCTGGGGGTGTATCGCAATGACAGGATGCACCGCGCGGTGAGCGCCAGCAGGAGGCGCGAGCTGAGCGACAGAGAACTTATGCACAGCTTGCAAAGAGCTCTAACGGGGGCCGGGACTGATGGGGAGAACTACTTTGACATGGGAGCGGATTTGCAATGGCAACCCAGTCGCAGGGCCATGGAGGCTGCAGGGTGTGAGCTTCCTTACATAGAAGAGGTGGATGAAGTCGAGGACGAGGAGGGCGAGTACTTGGAAGACTGATGGCGCGACCCGTATTTTTGCTAGATGGAACAGCAGCAGGCACCGGACCCCGCAATGCGGGCGGCGCTGCAGAGCCAGCCGTCCGGCATTAACTCCTCGGACGATTGGACCCAGGCCATGCAACGCATAATGGCGCTGACGACCCGCAACCCCGAAGCCTTTAGACAGCAACCCCAGGCCAACCGCCTTTCTGCCATACTGGAGGCCGTAGTGCCCTCCCGCTCCAACCCCACCCACGAGAAGGTCCTGGCTATCGTGAACGCGCTGGTGGAGAACAAGGCCATCCGTCCCGATGAGGCCGGGCTGGTATACAATGCTCTCTTGGAGCGCGTGGCCCGTTACAACAGCAGCAACGTGCAAACCAACCTGGACCGGATGGTGACCGATGTGCGCGAGGCCGTGTCTCAGCGCGAGCGATTCCAGCGCGACGCCAACTTGGGGTCGTTGGTAGCGCTAAACGCTTTCCTCAGCACCCAGCCCGCCAACGTGCCCCGTGGTCAGCAAGACTATACAAACTTTTTGAGTGCATTGAGACTCATGGTAGCTGAGGTGCCCCAGAGCGAGGTGTACCAGTCCGGGCCAGATTACTTCTTCCAGACCAGCAGACAGGGCTTGCAGACAGTGAACCTGACTCAGGCTTTCAAGAACCTGAAGGGTCTGTGGGGAGTGCACGCCCCAGTAGGGGATCGCGCGACCGTGTCTAGCTTGCTGACTCCCAACTCCCGCCTGCTGCTGCTGCTGGTATCCCCCTTTACTGACAGCGGTAGCATTGACCGCAACTCGTACTTGGGCTACCTGCTTAACCTGTATCGCGAGGCCATAGGACAGAGCCAGGTGGACGAGCAGACCTATCAAGAAATCACCCAAGTGAGCCGCGCCCTGGGTCAGGAAGACACGGGCAGTTTGGAAGCCACCCTGAACTTCTTGCTAACCAACCGGTCACAGAAGATCCCTCCTCAGTATGCGCTTACCGCTGAGGAGGAGCGGATCCTCAGATACGTGCAACAGAGCGTTGGACTGTTCCTGATGCAGGAGGGGGCGACACCTACCGCCGCGCTGGACATGACAGCTCGAAACATGGAGCCCAGCATGTATGCTAGTAACAGGCCTTTCATTAACAAACTGCTGGACTACCTGCACAGGGCGGCCGCCATGAACTCTGATTATTTCACCAATGCTATCCTGAACCCACACTGGCTGCCCCCACCTGGTTTCTACACTGGCGAGTACGACATGCCCGACCCCAATGACGGGTTCCTGTGGGACGATGTGGACAGCAGCATATTTTCCCCGCCTCCSGGTTATACAGTTTGGAAGAAGGAAGGGGGCGATAGAAGACACTCTTCCGTGTCGCTATCCGGAACGGCTGGTGCTGCCGCGACCGTGCCCGAAGCTGCAAGTCCTTTCCCTAGCTTGCCCTTTTCACTAAACAGCGTTCGCAGCAGTGAACTGGGGAGAATAACCCGCCCGCGCTTGATGGGCGAGGATGAGTACTTGAATGACTCTTTGCTGAGGCCAGAGAGGGAAAACAACTTCCCCACAATGCAATACAGAGTCTGGTGYATAAGATGAGTAGATGGAAGACCTATGCGCAGGATCACAGAGCACGAGCCCAGGTATCTTGGGGGCTACAAGCAGACCGTATCCGTGAGACGCCAGCGCCACGACAGGCAGATGGGTCTTGTGTGGGACGATGAGGACTCTGCCGATGATAGCAGCGTGTTGGTACTTGGGTGGAAGAGGAGGHGGCAACCCGTTCGCTCATCTGCGYCCCAGATTCGGGCGCATGTTGTAAAAGTGAAAGTAAAATAAAAAGGCAACTCACCAAGGCCATGGCGACCGAGCGTGCGTTCGTTCTTTTTTGTTATCTGTGTCTAGTACGATGAGGAGACGAGCCGTGCTAGGCGGAGCGGTGGTGTATCCGGAGGGTCCTCCTCCTTCTTACGAGAGCGTGATGCAGCAACAGGCGGCGATGATACAGCCCCCACTGGAGGCTCCCTTCGTACCCCCACGGTACCTGGCGCCTACGGAAGGGAGAAACAGCATTCGTTACTCGGAGCTGTCGCCCCTGTACGATACCACCAAGTTGTATCTGGTGGACAACAAGTCGGCGGACATCGCCTCCCTGAACTATCAGAACGACCACAGCAACTTCCTGACCACGGTGGTGCAGAACAATGACTTTACCCCCACGGAGGCTAGCACCCAGACCATCAACTTTGACGAGCGGTCGCGATGGGGCGGTCAGCTGAAGACCATCATGCACACCAACATGCCCAACGTGAACGAGTACATGTTCAGCAACAAGTTCAAGGCGAGGGTGATGGTGTCCAGAAAAGCTCCTGAAGGTGTTACAGTAAATGACACCTATGATCATAAAGAGGATATCTTGAAGTATGAGTGGTTTGAGTTCATTTTACCAGAAGGCAACTTTTCAGCCACCATGACGATCGACCTGATGAACAATGCCATCATTGACAACTACCTGGAAATTGGCAGACAGAATGGAGTGCTGGAAAGTGACATTGGTGTTAAGTTTGACACTAGAAATTTCAGGCTCGGGTGGGACCCCGAAACTAAGTTGATTATGCCAGGTGTCTACACTTATGAGGCATTCCATCCTGACATTGTATTGCTGCCTGGTTGCGGGGTAGACTTTACTGAAAGCCGACTTAGCAACTTGCTTGGCATCAGGAAGAGACATCCATTCCAGGAGGGTTTCAAAATCATGTATGAAGATCTTGAAGGGGGTAATATTCCTGCCCTTTTGGATGTCACTGCCTATGAGGAAAGCAAAAAGGATACCACTACTGAAACAACCACACTGGCTGTTGCAGAGGAAACTAGTGAAGATGATGATATAACTAGAGGAGATACCTATATAACTGAAAAACAAAAACGTGAAGCTGCAGCTGCTGAAGTTAAAAAAGAGTTAAAGATCCAACCTCTAGAAAAAGACAGCAAGAGTAGAAGCTACAATGTCTTGGAAGACAAAATCAACACAGCCTACCGCAGTTGGTACCTGTCCTACAATTACGGTAACCCTGAGAAAGGAATAAGGTCTTGGACACTGCTCACCACTTCAGATGTCACCTGTGGGGCAGAGCAGGTCTACTGGTCGCTCCCTGACATGATGCAAGACCCAGTCACCTTCCGCTCCACAAGACAAGTCAACAACTACCCAGTGGTGGGTGCAGAGCTTATGCCCGTCTTCTCAAAGAGTTTCTACAATGAGCAAGCCGTGTACTCTCAGCAGCTCCGACAGGCCACTTCGCTCACGCACGTCTTCAACCGCTTCCCTGAGAACCAGATCCTCATCCGCCCGCCGGCGCCCACAATTACCACCGTCAGTGAAAACGTTCCTGCTCTCACAGATCACGGGACCCTGCCGTTACGCAGCAGTATCCGGGGAGTCCAGCGCGTGACCGTTACTGACGCCAGACGCCGCACCTGTCCCTACGTTTACAAGGCCCTGGGCATAGTCGCGCCGCGCGTTCTTTCAAGCCGCACTTTCTAAAAAAAAAAAAAATGTCCATTCTCATCTCGCCCAGTAATAATACCGGTTGGGGACTGTATGCGCCCACCAAGATGTATGGAGGCGCCCGCAAGCGCTCTACCCAGCATCCTGTGCGCGTTCGCGGTCATTTCCGCGCTCCCTGGGGCGCACTCAAGGGTCGTACCCGCACTCGGACCACGGTCGATGATGTGATCGACCAGGTGGTCGCCGATGCTCGTAATTATACTCCTACTGCGCCTACATCTACTGTGGATGCAGTTATTGACAGTGTGGTGGCAGACGCCCGCGCCTATGCTCGCCGGAAGAGCCGAAGGAGGCGCATCGCCAGGCGCCACAGGGCTACTCCCGCCATGCGAGCCGCAAAAGCTATTCTGCGGAGGGCCAAACGTGTGGGGCGAAGAGCCATGCTTAGAGCGGCCAGACGCGCGGCTTCAGGTGCCAGCAGCGGCAGGTCCCGCAGGCGCGCGGCCACGGCGGCAGCAGCGGCCATTGCCAACATGGCCCAACCGCGAAGAGGCAATGTGTACTGGGTGCGTGATGCCACTACCGGCCAGCGCGTGCCCGTGCGCACCCGCCCCCCTCGCACTTAGAAGATACTGAGCAGTCTCCGATGTTGTGTCCCAGCGGCAAGTATGTCCAAGCGCAAATACAAGGAAGAGATGCTCCAGGTCATCGCGCCTGAAATCTACGGTCCGCCGGTGAAGGATGAAAAAAAGCCCCGCAAAATCAAGCGGGTCAAAAATAACAAAAAGGAAGAAGATGACGATGATGGGCTGGTGGAGTTTGTGCGCGAGTTCGCCCCAAGACGGCGCGTGCAGTGGCGCGGGCGCAAAGTGCGTCAAGTGCTCAGACCCGGGACCACTGTGGTTTTTACACCTGGCGAGCGTTCCAGCACTACTTTTAAACGGTCCTATGATGAGGTGTACGGGGATGACGATATTCTTGAGCAGGCGGCAGACCGCCTTGACGAGTTTGCTTATGGCAAGCGCACTAGATCCAGTCCCAAAGAGGAGGCTGTGTCCATTCCTTTGGATCATGGAAATCCCACCCCCAGCCTCAAACCAGTCACCCTGCAGCAAGTGCTGCCCGTGCCTGCGCGGAGAGGCGTAAAGCGCGAGGGTGAGGACCTATATCCCACCATGCAGCTAATGGTGCCCAAGCGCCAGAGGCTAGAAGACGTACTGGAGAAAATGAAAGTGGATGCCGATATCCAGCCTGAGGTCAAAGTAAGACCTATCAAGGAAGTGGCGCCAGGTTTGGGAGTACAAACCTTCGACATCAAGATTCCCACCGAGTCCATGGAAGTGCAGACCGAACCTGCAAAACCCACCACCTCAATTGAGGTGCAAACGGAACCCTGGATGCCCGCGCCCGTTGCCGCCCCCAGCACCACTCGAAGATCACGACGAAAGTACGGCCCAGCAAGTCTGCTAATGCCCAACTATGCTCTGCACCCATCCATCATTCCCACTCCGGGTTACAGAGGCACTCGCTACTATCGAAACCGGAGCAACACCTCTCGCCGCCGCAAACCACCTGCAAGTCGCACTCGCCGTCGCCGCCGCCGCAACACTGCCAGCAAATTGACTCCCGCCGCCCTGGTGCGGAGAGTGTACCGCGATGGTCGCGCTGAACCTCTGACGCTGCCGCGCGCGCGCTACCATCCAAGCATCACCACTTAATGACTGTTGACGCTGCCTCCTTGCAGATATGGCCCTCACTTGCCGCCTTCGCGTCCCCATTACTGGCTACCGAGGAAGAAACTCGCGCCGTAGAAGGATGTTGGGGCGAGGGATGCGCCGCCACAGACGAAGGCGCGCTATCAGCAGACGATTAGGGGGTGGCTTTTTGCCAGCTCTTATACCCATCATCGCCGCAGCGATCGGGGCGATACCAGGCATAGCTTCAGTGGCGGTTCAGGCCTCGCAGCGCCACTAACATTGGAAAAAACTTATAAATAAAAAATAGAATGGACTCTGACGCTCCTGGTCCTGTGACTATGTTTTTGTAGAGATGGAAGACATCAATTTTTCATCCCTGGCTCCGCGACACGGCACGAGGCCGTACATGGGCACCTGGAGCGACATCGGCACGAGCCAACTGAACGGGGGCGCCTTCAATTGGAGCAGTATCTGGAGCGGGCTTAAAAATTTTGGCTCGACCGTAAAAACCTATGGGAACAAAGCTTGGAACAGCAGCACAGGGCAGGCTCTGAGAAATAAGCTTAAGGAACAAAACTTCCAACAGAAGGTGGTCGATGGGATCGCCTCTGGTATAACGGCGTAGTGGATCTGGCCAACCAGGCTGTACAAAAACAGATAAACAGCCGCCTGGACCCGCCGCCCGCAACCCCTGGTGAAATGGAAGTGGAGGAAGACTTCCTCCGCTGGAAAAGCGGGGCGACAAGCGTCCGCGACCCGAGCTAGAGCAGACGCTGGTGACGCGCGCAGACGAGCCCCCTTCATATGAGGAGGCAGTAAAGCTCGGAATGCCCACTACCAGGCCTGTAGCTCACATGGCTACCGGGGTGATGAAACCTTCTCAGTCACATCGACCCGCCACCTTGGACTTGCCTCCTCCCCCTGCTTCTGCGGCGCCTGTTCCCAAACCTGTCGCTACCAGAAAGCCCACCGCCGTACAGCCCGTCGCCGTAGCCAGACCGCGTCCTGGGGGCACACCGCGCCCGAAAGCAAACTGGCAAAGTACTCTGAACAGCATCGTGGGTCTGGGCGTGCAGAGTGTAAAGCGCCGTCGCTGCTATTAATTAAATATGGAGTAGCGCTTAACTTGCTTGTCTGTGTGTATGTATCATCACCACGCCGCCGCAGCAGAGGAGAAAGGAAGAGGTCGCGCGCCGAGGCTGAGTTGCTTTCAAGATGGCCACCCCATCGATGATGCCCCAATGGGCATACATGCACATCGCCGGACAGGATGCTTCGGAGTACCTCAGTCCGGGTCTGGTGCAGTTCGCCCGTGCAACAGACACCTACTTCAGTATGGGGAACAAATTTAGAAACCCCACAGTGGCGCCCACCCACGATGTGACCACCGACCGTAGCCAGCGCCTGATGCTGCGCTTCGTGCCCGTTGACCGGGAAGACAATACCTACTCTTACAAAGTTCGCTACACGCTGGCTGTAGGCGACAACAGAGTGCTTGACATGGCCAGCACATTCTTTGACATTCGGGGGGTGCTTGATAGAGGTCCTAGCTTCAAGCCATATTCCGGCACAGCTTACAATTCACTCGCTCCTAAGGGCGCGCCCAATACATCTCAGTGGATAGTTACAACAAATGGGGACAATGCAGTAACTACCACCACAAACACATTTGGCATTGCTTCCATGAAGGGAGGCAATATTACTAAAGAAGGTTTGCAAATTGGGAAAGACATTACCACTACTGAAGGAGAAGAAAAGCCCATTTATGCCGATAAAACATATCAGCCAGAGCCTCAAGTTGGAGAAGAATCATGGACTGATACTGATGGAACAAATGAAAAGTTTGGTGGAAGAGCCCTTAAACCAGCTACCAACATGAAGCCATGCTACGGGTCTTTTGCAAGACCTACAAACATAAAAGGGGGCCAAGCTAAAAACAGAAAAGTAAAACCAACAACCGAAGGAGGGGTTGAAACTGAGGAACCAGATATTGATATGGAATTTTTCGATGGTAGAGATGCTGTTGCAGGAGCTTTAGCGCCTGAAATTGTGCTTTATACGGAAAATGTAAATTTGGAAACTCCAGACAGTCATGTGGTATATAAACCAGAAACGTCTAATAACTCTCATGCAAATTTGGGTCAACAAGCCATGCCTAACAGACCCAATTACATTGGCTTCAGGGATAACTTCGTAGGCCTAATGTACTACAACAGTACTGGAAATATGGGAGTTTTGGCTGGCCAAGCATCACAACTGAATGCAGTGGTTGACTTGCAGGACAGAAATACTGAACTGTCATATCAGCTTTTGCTTGATTCTCTGGGAGACAGAACCAGATACTTCAGCATGTGGAATCAGGCTGTGGACAGTTACGATCCCGATGTTCGCATTATTGAAAATCATGGCATCGAGGATGAACTGCCTAATTACTGTTTTCCTCTGAATGGCATAGGACCAGGGCACACATATCAAGGCATTAAAGTTAAAACCGATGACACTAATGGATGGGAAAAAGATGCTAATGTTGCTCCAGCTAATGAAATAACCATAGGCAACAACCTGGCTATGGAAATTAATATCCAAGCTAACCTTTGGAGAAGTTTTCTGTACTCTAATGTGGCTTTGTACCTTCCAGATGTTTACAAGTACACGCCACCTAACATTACTTTGCCCACTAACACCAACACCTATGAGTACATGAACGGGCGAGTGGTATCCCCATCCCTGGTTGATTCATACATCAACATTGGCGCCAGGTGGTCTCTTGACCCAATGGACAATGTGAATCCATTCAACCACCACCGCAATGCTGGTCTGCGCTACAGGTCCATGCTTCTGGGAAATGGTCGTTATGTGCCTTTCCACATACAAGTGCCTCAGAAATTCTTTGCTGTCAAGAACCTACTTCTTCTACCTGGCTCCTACACCTACGAGTGGAACTTCCGAAAGGATGTGAACATGGTCCTGCAAAGTTCCCTTGGAAATGACCTCAGAACGGATGGTGCTACCATAAGTTTCACCAGCATCAATCTCTATGCCACCTTCTTCCCCATGGCTCACAACACAGCTTCCACCCTTGAAGCCATGCTGCGCAACGATACCAATGATCAGTCATTTAACGACTACCTCTCTGCAGCTAACATGCTTTACCCCATTCCTGCCAATGCAACCAACATTCCAATTTCCATCCCATCTCGCAACTGGGCAGCCTTCAGGGGCTGGTCCTTCACCAGACTCAAAACCAAGGAGACTCCATCTCTTGGATCAGGGTTCGATCCCTACTTCGTATATTCTGGATCTATTCCCTACCTGGATGGCACCTTTTACCTTAACCACACTTTCAAGAAGGTCTCCATCATGTTTGACTCCTCAGTCAGCTGGCCTGGCAATGACAGGCTGTTGAGTCCAAATGAGTTTGAAATCAAGCGCACTGTGGACGGGGAAGGATACAACGTGGCACAATGCAACATGACCAAAGACTGGTTCCTGGTTCAGATGCTTGCCAATTACAACATTGGCTACCAGGGCTTTTACATCCCTGAGGGATACAAGGATCGCATGTACTCCTTTTTCAGAAACTTCCAGCCTATGAGCAGGCAGGTGGTTGATGAGGTTAATTACACTGACTACAAAGCCGTCACCTTACCATACCAACACAACAACTCTGGCTTTGTAGGGTACCTTGCACCTACTATGAGACAAGGGGAACCTTACCCAGCCAATTATCCATACCCGCTCATCGGAACTACTGCCGTTAAGAGTGTCACCCAGAAAAAGTTCCTGTGCGACAGGACCATGTGGCGCATTCCCTTCTCCAGCAACTTCATGTCCATGGGGGCCCTTACCGACCTGGGACAGAACATGCTCTATGCCAACTCAGCCCATGCGCTGGACATGACTTTTGAGGTGGATCCCATGGATGAGCCCACCCTGCTTTATCTTCTTTTCGAAGTCTTCGACGTGGTCAGAGTGCACCAGCCACACCGCGGCGTCATCGAGGCCGTCTACCTGCGCACACCGTTCTCGGCCGGCAACGCCACCACATAAGAAGCCTCTTGCTTCTTGCAAGCAGCAGCTGCAGCCATGACATGCGGGTCCGGAAACGGCTCCAGCGAGCAAGAGCTCAAAGCCATCGTCCGAGACCTGGGCTGCGGACCCTATTTCCTGGGAACCTTTGACAAGCGTTTCCCGGGGTTCATGGCCCCCGACAAGCTCGCCTGCGCCATAGTCAACACTGCCGGACGCGAGACGGGGGGAGAGCACTGGCTGGCTTTTGGTTGGAACCCGCGCTACAACACCTGCTACCTTTTTGATCCTTTTGGGTTCTCGGATGAGCGGCTCAAACAGATTTACCAGTTTGAGTACGAGGGGCTCCTGCGTCGCAGTGCCCTTGCTACCAAAGACCGCTGCATCACCCTGGAGAAGTCTACCCAAAGCGTGCAGGGTCCGCGCTCAGCCGCCTGTGGACTTTTTTGCTGTATGTTCCTTCATGCCTTTGTGCACTGGCCCGACCGCCCCATGGACGGAAACCCCACCATGAAGTTGCTGACTGGGGTGTCCAACAGCATGCTCCAATCACCCCAAGTCCAGCCCACCCTGCGCCGCAACCAGGAGGTGCTATACCGCTTCCTAAACACCCACTCATCTTACTTTCGTTCTCACCGCGCGCGCATTGAAAGGGCCACCGCGTTTGACCGTATGGATATGCAATAAGTCATGTAAAACCGTGTTCAATAAACAGCACTTTATTTTTACATGCACTGAGGCTCTGGTTTTGCTCATTTGTTTCATCATTTACTCAGAAGTCGAATGGGTTCTGGCGGGAGTCAGAGTGACCCGCGGGCAGGGATACGTTGCGGAACTGTAACCTGTTCTGCCACTTGAACTCGGGGATTACCAGCTTGGGAACTGGAATCTCGGGAAAGGTGTCTTGCCACAACTTTCTGGTCAGTTGCATAGCGCCAAGCAGGTCAGGAGCAGAGATCTTGAAATCACAGTTGGGGCCGGCATTCTGGACACGGGAGTTGCGATACACTGGGTTGCAACACTGGAACACTATCAACGCTGGGTGTCTTACGCTTGCCAACACGGTTGGGTCACTGATGGTAGTCACATCCAAGTCTTCAGCATTGGCCATCCCAAAGGGGGTCATCTTACATGTCTGCCTGCCCATCACGGGAGCGCAGCCTGGCTTGTGGTTGCAATCACAATGAATGGGGATCAGCATCATCCTGGCTTGGTCGGGAGTTATCCCTGGGTACACAGCCTTCATGAAGGCTTCGTACTGCTTAAAAGCTTCCTGGGCCTTACTTCCCTCGGTGTAGAACATCCCACAGGACTTGCTGGAAAATTGATTAGTAGTACAGTTGGCATCATTCACACAACAGCGGGCATCGTTGTTGGCCAACTGAACCACATTTCTGCCCCAGCGGTTTTGGGTGATCTTGGCTCTGTCTGGATTCTCCTTCATAGCGCGCTGCCCGTTCTCGCTCGCCACATCCATCTCGATAATGTGGTCCTTCTGGATCATGATAGTGCCATGCAGGCATTTCACCTTGCCTTCATAATCGGTGCATCCATGAGCCCACAGAGCGCACCCGGTGCACTCCCAATTATTGTGGGCGATCTCAGAATAATAATGTACCAATCCCTGCATGAATCTTCCCATCATTGTTGTCAAGGTCTTCATGCTGGTAAATGTCAGCGGGATGCCACGGTGCTCCTCGTTCACATACTGGTGGCAGATACGCTTGTATTGCTCGTGCTGCTCTGGCATCAGCTTGAAAGAGGTTCTCAGATCATTATCCAGCCTGTACCTTTCCATTAGCACAGCCATCACTTCCATGCCCTTCTCCCAGGCAGATACCAGGGGCAGACTCAAAGGATTCCTAACAGCAATAAAAGTAGCTCCTTTAGCTATAGGGTCATTCTTGTCGATCTTCTCAACACTTCTCTTGCCATCCTTCTCAATGATGCGCACCGGGGGGTAGCTGAAGCCCACGGCCACCAACTGAGCCTGTTCTCTTTCTTCTTCACTATCCTGGCTGATGTCTTGCAGAGGGACATGCTTGGTCTTCCTGGGCTTCTTCTTGGGAGGGATCGGGGGAGGACTGTTGCTCCGCTCCGGAGACAGGGATGACTGCGAAGTTTCGCTTACCAATACCACCTGGCTCTCGGTAGAAGAACCGGACCCCACACGACGGTAGGTGTTCCTCTTCGGGGGCAGAGGTGGAGGCGACTGAGATGGGCTGCGGTCTGGCCTTGGAGGCGGATGGCTGGCAGAGCTCATTCCGCGTTCGGGGGTGTGCTCCCGGTGGCGGTCGCTTGACTGATTTCCTCCGCGGCTGGCCATTGTGTTCTCCTAGGCAGAGAAACAACAGACATGGAAACTCAGCCATCACTGCCAACATCGCTGCAAGCACCATCACACCTCGCCCCCAGCAGCGACGAGGAGGAGAGCTTAACCACCCCACCACCCAGTCCCGCTACCACCACCTCTACCCTCGATGATGAGGAGGAGGTCGACGCAGCCCAGGAGATGCAGGCGCAGGATAATGTGAAAACGGAAGAGATTGAGGCAGATGTCGAGCAGGACCCGGGCTATGTGACGCCGGCGGAGCACCAGGAGGAGCTGAACGCTTTCTAGACAGAGAGGATGACGACCGCCCAGAGCATCAAGCAGATGGCGTTTACCAGGAGGCTGGGATCAGGGATCATGTCGCCGACTACCTCACCGGCCTTGGTGGGGAGGACGTGCTCCTCAAACATCTAGCAAGGCAGTCGATCATAGTTAAAGACGCATTGCTCGATCTCACTGAAGTGCCCATCAGTGTGGAAGAGCTTAGCCGCGCCTACGAGCTGAACCTCTTTTCGCCTCAGGTACCCCCCAAGCGGCAGCCAAACGGCACCTGCGAGGCCAACCCTCGACTCAACTTCTATCCAGCTTTTACTATCCCCGAAGTGTTGGCCACCTACCACATCTTTTTCAAGAACCAAAAGATTCCAGTCTCCTGCCGCGCCAACCGCACCCGCGCCGATGCCCTGCTCAACTTGGGTCCGGGAGCTCGCTTACCTGATATAGCTTCCTTGGAAGAGGTTCCAAAGATCTTTGAGGGTCTGGGAAGTGATGAGACACGGGCCGCAAATGCTCTGCAACAGGGAGAGAATGACATGGATGAACACCACAGCGCTCTGGTGGAACTGGAGGGTGACAATGCCCGGATTGCAGTGCTCAAGCGCAGTATCGTGGTCACCCATTTTGCCTACCCCGCTGTTAACCTGCCCCCCAAAGTTATGAGCGCTGTCATGGACCATCTGCTCATCAAACGAGCAAGACCTCTTTCAGAAAACCAGAACATGCAGGATCCAGACGCCTCGGACGAGGGCAAGCCGGTAGTCAGTGACGAGCAGCTATCTCGCTGGCTGGGTACCAACTCCCCCCGAGATTTGGAAGAGAGGCGCAAGCTTATGATGGCTGTAGTGCTAGTAACTGTGGAGCTGGAGTGTCTGCGCCGCTTTTTCACCGACCCTGAGACCCTGCGCAAGCTAGAGGAGAACCTGCACTACACCTTTAGACATGGCTTCGTGCGGCAGGCATGCAAGATCTCCAACGTGGAGCTTACCAACCTGGTTTCTTACATGGGCATTTTGCATGAGAACCGACTAGGGCAGAGCGTCCTGCACACCACCCTTAAAGGGGAGGCCCGCCGTGACTACATCCGAGACTGTGTCTACCTCTACCTCTGCCATACCTGGCAAACTGGTATGGGTGTGTGGCAACAGTGTTTGGAAGAGCAGAACCTAAAAGAGCTGGACAAGCTCTTGCAGAGATCCCTCAAAGCCCTGTGGACAGGTTTTGATGAGCGCACCGTCGCCTCGGACCTGGCAGACATCATCTTCCCCGAGCGTCTCAGGGTTACTCTGCGAAACGGCCTGCCAGACTTTATGAGCCAGAGCATGCTTAACAACTTTCGCTCTTTCATCCTGGAACGCTCCGGTATCCTGCCTGCCACCTGCTGTGCGCTGCCCTCCGACTTTGTGCCTCTCACCTACCGCGAGTGCCCACCGCCGCTATGGAGCCACTGCTACCTGTTCCGCCTGGCCAACTACCTCTCCTACCACTCGGATGTTATAGAGGATGTGAGCGGAGACGGCCTGCTGGAATGCCACTGCCGCTGCAATCTTTGCACACCCCACCGCTCCCTTGCCTGCAACCCCCAGTTGCTGAGCGAGACCCAGATTATCGGCACCTTCGAGCTGCAGGGTCCCAGAAGTAAAGGCGAGGGGTCTTCTCCGGGGCAGAGTTTGAAACTGACACCGGGGCTGTGGACCTCCGCCTACCTGCGCAAGTTTCACCCCGAGGACTACCATCCCTATGAGATCAGGTTCTATGAGGACCAATCACATCCTCCCAAAGTCGAGCTCTCAGCCTGCGTCATCACCCAGGGAGCAATTCTGGCCCAATTGCAAGCCATCCAAAAATCTCGCCAAGAATTTCTGCTAAAAAAGGGAAACGGGGTCTACCTTGACCCTCAGACCGGTGAGGAGCTCAACACAAGGTTCCCCCAGGATGTCCCATCGCCGAGGAAGCAAGAAGTTGAAGGTGCAGCTGTCGCCCCCAGAGGATATGAAGGAAGACTGGGACAGTCAGGCAGAGGAGGAGATGGAAGATTGGGACAGCCAGGCAGAGGAGGTGGACAGCCTGGAGGAAGACAGTTTGGAGGAGGAAGACGAGGAGGCAGAGGAGGTGGAAGAAGCAACCGCCGCCAAACAGTTGTCATCGGCGGCGGAGACAAGCAAGTCCCCAGACAGCAGCACGGCTACCATCTCCGCTCCGGGTCGGGGGGCCCAGCGGCGGCCCAACAGTAGATGGGACGAGACCGGGCGATTCCCAAACCCGACCACCGCTTCCAAGACCGGTAAGAAGGAGCGACAGGGATACAAGTCCTGGCGTGGACATAAAAACGCTATCATCTCCTGCTTGCATGAATGCGGGGGCAACATATCCTTCACCCGGCGATACCTGCTCTTCCACCACGGTGTAACTTCCCCCGCAATATCTTGCATTACTACCGTCACCTCCACAGCCCCTACTGCAGTCAGCAAGTCCCGGCAACCCCGACAGAAAAATACAGCAGCGACAACGGTGACCAGAAAACCAGCAGTTAGAAAATCCACAACAAGTGCACCAGGAGGAGGACTGAGGATCACAGCGAACGAGCCAGCGCAGACCAGAGAGCTGAGGAACCGGATCTTTCCAACCCTCTATGCCATTTTCCAGCAGAGTCGGGGGCAAGAGCAGGAACTGAAAGTAAAAAACCGATCTCTGCGCTCGCTCACCAGAAGTTGTTTGTATCACAAGAGCGAAGACCAACTTCAGCGCACTCTCGAGGACGCCGAGGCTCTCTTCAACAAGTACTGCGCGCTGACTCTTAAAGAGTAGCCCTTGCCCGCGCTCATTTTGAAAACGGCGGGAATCACGTCACCCTTGGCACCTGTCCTTTGCCCTTGTCATGAGTAAAGAGATTCCCACGCCTTACATGTGGAGCTATCAGCCCCAAATGGGGTTGGCAGCAGGCGCTTCCCAGGACTACTCCACCCGCATGAATTGGCTTAGCGCCGGGCCCTCAATGATATCACGGGTTAATGATATACGAGCTTATCGAAACCAGTTACTCCTAGAACAGTCAGCTCTCACCACCACACCCCGTCAACACCTTAATCCCCGAAATTGGCCCGCCACCCTGGTGTACCAGGAAAATCCCGCTCCCACCACCGTACTACTTCCTCGAGACGCCCAGGCCGAAGTTCAGATGACTAACGCAGGTGTACAGCTGGCGGGCGGTTCCGCCCTATGTCGTCACCGACCTCAACAGAGTATAAAACGCCTGGTGATTAGAGGCCGAGGTATCCAGCTCAACGACGAGTCGGTTAGCTCTTCGCTTGGTCTGCGACCAGACGGAGTCTTCCAAATCGCCGGCTGTGGGAGATCTTCCTTCACTCCTCGTCAGGCTGTGCTGACTTTGGAGAGTTCGTCCTCGCAGCCCCGCTCGGGCGGCATTGGAACTCTCCAGTTTGTGGAGGAGTTTACTCCCTCTGTCTACTTCAACCCCTTCTCCGGCTCTCCTGGCCAGTACCCGGACGAGTTCATACCAAACTTCGACGCAATCAGCGAGTCAGTGGATGGCTATGATTGATGTCTAATGGTGGTGCGGCTGAGCTAGCTCGACTGCGACACCTAGACCACTGCCGCCGCTTTCGCTGCTTCGCCCGGGAACTCACCGAGTTCATCTACTTCGAACTCTCCGAGGAGCACCCTCAGGGTCCGGCCCACGGAGTGCGGATTACCATCGAAGGGGGAATAGACTCTCGCCTGCATCGCATCTTCTCCCAGCGGCCCGTGCTAATTGAACGCGACCAGGGAAATACAACCATCTCCATCTACTGCATCTGTAACCACCCCGGATTGCATGAAAGCCTTTGCTGTCTTGTTTGTGCTGAGTTTAATAAAAACTGAGTTAAGACCCTCCTACGGACTACCGCTTCTTCAATCAGGACTTTACAACACCAACCAGATCTTCCAGAAGACCCAGACCCTTCCTCCTTTCATCCAGGACTCTAACTCTACCTTACCAGCACCCTCCACTACTAACCTTCCCGAAACAAACAAGCTTGCATCTCATCTGCAACACCGCCTTTCACGAAGCCTTCTTTCTGCCAATACTACCACTCCCAAAACCGGAGGTGAGCTCCGCGGTCTTCCTACTGACGACCCCTGGGTGGTAGCGGGTTTTGTAACGTTAGGAGTAGTTGCGGGTGGGCTTGTGCTGATCCTTTGCTACCTATACACACCTTGCTGTGCATATTTAGTCATATTGTGCTGTTGGTTTAAGAAATGGGGGCCATACTAGTCGTGCTTGCTTTACTTTCGCTTTTGGGTCTGGGCTCTGCTAATCTCAATCCTCTCGATCACGATCCATGTTTAGACTTCGACCCAGAAAACTGCACACTTACTTTTGCACCCGACACAAGCCGTCTCTGTGGAGTTCTTATTAAGTGCGGATGGGACTGCAGGTCCGTTGAAATTACACATAATAACAAAACATGGAACAATACCTTATCCACCACATGGGAGCCAGGAGTTCCCCAGTGGTATACTGTCTCTGTCCGAGGTCCTGACGGTTCCATCCGCATTAGTAACAACACTTTCATTTTTTCTGAAATGTGCGATCTGGCCATGTTCATGAGCAGACAGTATGACCTATGGCCTCCCAGCAAAGAGAACATTGTGGCATTTTCCATTGCTTATTGCTTGGTAACATGCATCATCACTGCTATCATTTGTGTGTGCATACACTTGCTTATAGTTATTCGCCCTAGACAAAGCAATGAGGAAAAAGAGAAAATGCCTTAACCTTTTTCCTCATACCTTTTCTTTACAGCATGGCTTCTGTTACAGCTCTAATTATTGCCAGCATTGTCACTGTCGCTCACGGGCAAACAATTGTCCATATTACCTTAGGACATAATCACACTCTTGTAGGGCCCCCAATTACTTCAGAGGTTATTTGGACCAAACTTGGAAGTGTTGATTATTTTGATATAATTTGCAACAAAACTAAACCAATATTTGTAATCTGTAACAGACAAAATCTCACGTTAATTAATGTTAGCAAAATTTATAACGGTTACTATTATGGTTATGACAGATCCAGTAGTCAATATAAAAATTACTTAGTTCGCATAACTCAGCCCAAATTAACAGTGCCAACTATGACAATAATTAAAATGGCTAATAAAGCATTAGAAAATTTTACATCACCAACAACACCCAATGAAAAAAACATTCCAAATTCAATGATTGCAATTATTGCGGCGGTGGCATTGGGAATGGCACTAATAATAATATGCATGCTCCTATATGCTTGTTACTATAAAAAGTTTCAACATAAACAGGATCCACTACTAAATTTTAACATTTAATTTTTTATACAGATGATTTCCACTACAATTTTTATCATTACTAGCCTTGCAGCTGTAACTTATGGCCGTTCACACCTAACTGTACCTGTTGGCTCAACATGTACACTACAAGGACCCCAAGAAGGCTATGTCACTTGGTGGAGAATATATGATAATGGAGGGTTCGCTAGACCATGTGATCAGCCTGGTACAAAATTTTCATGCAACGGAAGAGACTTGACCATTATTAACATAACATCAAATGAGCAAGGCTTCTATTATGGAACCAACTATAAAAATAGTTTAGATTACAACATTATTGTAGTGCCAGCCACCACTTCTGCTCCCCGCAAATCCACTTTCTCTAGCAGCAGTGCCAAAGCAAGCACAATTCCTAAAACAGCTTCTGCTATGTTAAAGCTTCCAAAAATCGCTTTAAGTAATTCCACAGCCGCTCCCAATACAATTCCTAAATCAACAATTGGCATCATTACTGCCGTGGTAGTGGGATTAATGATTATATTTTTGTGTATAATGTACTACGCCTGCTGCTATAGAAAACATGAACAAAAAGGTGATGCATTACTAAATTTTGATATTTAATTTTTTATAGAATTATGATATTGTTTCAATCAAATACCACTACCTCCTATGCATACACAAACATTCAGCCTAAATACGCTATGCAACTAGAAATCACAATACTAATTGTAATTGGAATTCTTATACTATCTGTTATTCTTTATTTTATATTCTGCCGTCAAATACCCAATGTTCATAGAAATTCTAAAAGACGTCCCATCTATTCTCCTATGATTAGTCGTCCCCATATGGCTCTGAATGAAATCTAAGATCTTTTTTTTTCTCTTACAGTATGGTGAACATCAATCATGATCCCTAGAAATTTCTTCTTCACCATACTCATCTGTCCTTTTAATGTCTGTGCTACTTTCACAGCAGTAGCCACTGCAAGCCCAGACTGTATAGGACCATTTGCTTCCTATGCACTTTTTGCCTTCGTTACTTGCATCTGCGTGTGTAGCATAGTCTGCCTGGTTATTAATTTTTTCCAACTGGTAGACTGGATCTTTGTGCGAATTGCCTACCTACGTCACCATCCCGAATACCGCAATCAAAATGTTGCGGCACTTCTTAGGCTTATTTAAAACCATGCAGGCTATGCTACCAGTCATTTTAATTTTGCTACTACCCTGCATTCCCCTAGCTTCCACCGCCACTCGCGCTACACCTGAACAACTTAGAAAATGCAAATTTCAACAACCATGGTCATTTCTTGATTGCTACCATGAAAAATCTGATTTTCCCACATACTGGATAGTGATTGTTGGAATAATTAACATACTTTCATGTACCTTTTTCTCAATCACAATATACCCCACATTTAATTTTGGGTGGAATTCTCCCAATGCACTGGGTTACCCACAAGAACCAGATGAACATATTCCACTACAACACATACAACAACCACTAGCACTGGTACAGTATGAAAATGAGCCACAACCTTCACTGCCCCCTGCCATTAGTTACTTCAACCTAACCGGCGGAGATGACTGACCCAATCGCCACATCATCCACCGCTGCCAAGGAGCTGCTGGACATGGACGGACGTGCCTCAGAACAGCGACTCATCCAACTACGCATTCGTCAGCAGCAGGAACGAGCAGTAAAAGAGCTAAGGGATGCCATTGGGATTCACCAGTGCAAAAAAGGCATATTCTGCTTAGTAAAACAATCCAAAATCTCCTACGAGWTCACCGCTACTGACCATCGTCTCTCATACGAGCTCGGTCCGCAGCGACAAAAATTCACCTGCATGGTGGGAATCAACCCCATAGTTATCACCCAGCAGTCTGGAGATACTAAGGGTTGTATCCAGTGTTCCTGTGATTCCACCGAGTGCATCTACACACTGCTGAAGACCCTCTGCGGCCTTCGAGACCTCCTACCCATGAACTAATCATTGCCCCTACCTTACCCAATCAAAATATTAATAAAGACACTTACTTGAAATCAGCAATACAGTCTTTGTCAAAACTTTCTACCAGCAGCACCTCACCCTCTTCCCAACTCTGGTACTCTAAACGTCGGAGGGTGGCATACTTTCTCCACACTTTGAAAGGGATGTCAAATTTTATTTCCTCTTCTTTGCCCACAATCTTCATTTCTTTATCCCCAGATGGCCAAGCGAGCTCGGCTAAGCACTTCCTTCAACCCGGTGTACCCTTATGAAGATGAAAGCAGCTCACAACACCCATTTATAAATCCTGGTTTCATTTCCCCTGACGGGTTCACACAAAGTCCAAACGGGGTTTTAAGTCTTAAATGTGTTAATCCACTTACCACTGCAAGCGGCTCCCTCCAACTTAAAGTGGGAAGTGGTCTTACAGTAGACACTACTGATGGATCCTTAGAAGAAAACATCAAAGTTAACACCCCCCTAACAAAGTCAAACCATTCTATAAATTTACCAATAGGAAACGGTTTGCAAATAGAACAAAACAAACTTTGCAGTAAACTCGGAAATGGTCTTACATTTGACTCTTCCAATTCTATTGCACTGAAAAATAACACTTTATGGACAGGTCCAAAACCAGAAGCCAACTGCATAATTGAATACGGGAAACAAAACCCAGATAGCAAACTAACTTTAATCCTTGTAAAAAATGGAGGAATTGTTAATGGATATGTAACGCTAATGGGAGCCTCAGACTACGTTAACACCTTATTTAAAAACAAAAATGTCTCCATTAATGTAGAACTATACTTTGATGCCACTGGTCATATATTACCAGACTCATCTTCTCTTAAAACAGATCTAGAACTAAAATACAAGCAAACCGCTGACTTTAGTGCAAGAGGTTTTATGCCAAGTACTACAGCGTATCCATTTGTCCTTCCTAATGCGGGAACACATAATGAAAATTATATTTTTGGTCAATGCTACTACAAAGCAAGCGATGGTGCCCTTTTTCCGTTGGAAGTTACTGTTATGCTTAATAAACGCCTGCCAGATAGTCGCACATCCTATGTTATGACTTTTTTATGGTCCTTGAATGCTGGTCTAGCTCCAGAAACTACTCAGGCAACCCTCATAACCTCCCCATTTACCTTTTCCTATATTAGAGAAGATGACTGACAACAAAAATAAAGTTCAACATTTTTTATTGAAATTCCTTTTACAGTATTCGAGTAGTTATTTTGCCTCCCCCTTCCCATTTAACAGAATACACCAATCTCTCCCCACGCACAGCTTTAAACATTTGGATACCATTAGAGATAGACATAGTTTTAGATTCCACATTCCAAACAGTTTCAGAGCGAGCCAATCTGGGGTCAGTAATACATAAAAATGCATCGGGATAGTCTTTTAAAGCGCTTTCACAGTCCAACTGTTGCGGATGCGACTCCGGAGTCTGAATCACGGTCATCTGGAAGAAGAACGATGGGAATCATAATCCGAAAACGGAATCGGGCGATTGTGTCTCATCAAACCCACAAGCAACCGCTGTCTGCGTCGCTCCGTGCGACTGCTGTTTATGGGATCGGGGTCCGCAGTGTCCTGAAGCATGATTTTAATAGCCCTTAACATTAACTTTCTGGTGCGATGCGCGCAGCAACGCATTCTGATTTCACTTAGATTACTACAGTAGGTACAGCACATTATCACAATATTGTTTAATAAACCATAATTAAAAGCGCTCCAGCCAAAACTCATATCTGATATAATCGCCCCTGCATGACCATCATACCAAAGTTTAATATAAATAAATGTCGTTCCCTCAAAAACACACTACCCACATACATGATCTCTTTTGGCATGTGCATATAACAATTTGTCTGTACCATGGACAACGTTGGTTAATCATGCAACCCAATATAACCTTCCGGAACCACACTGCCAACACCGCTCCCCCAGCCATGCATTGAAGTGAACCCTGCTGATTACAATGACAATGAAGAACCCAATTCTCTCGACCATGAATCACTTGAGACTGAAAAATATCTATAGTAGCACAACAAAGACATAAATGCATGCATCTTCTCATAATTTTTAACTCCTCTGGATTTAAAAACATATCCCAAGGAATGGGAAACTCTTGCAGAACAGTAAAGCTGGCAGAACAAGGAAGACCACGAACACAACTTACACTATGCATAGTCATAGTATCACAATCTGGCAACAGCGGGTGGTCTTCAGTCATAGAAGCTCGGGTTTCATTTTCCTCACATCGTGGTAATTGGGCTCTGGTGTAAGGGTGATGTCTGGCGCATGATGTGGAGCGTGCGCGCAACCTTGTCATAATGGAGTTGCTTCCTGACATTCTCGTATTTTGTATAGCAAAACGCTGCCCTGGCACAACACACTCTTCTTCGTCTTCTATCCTGCCGCTTAGTGTGTTCCGTCTGATAATTCAAGTACAGCCACACTCTTAAGTTGGTCAAAAGAATGCTGGCTTCAGTTGTAATCAAAACTCCATCRYATYTAATTGTTCTRAGGAAATCATCCACGGTAGCATATGCAAATCCCAACCAAGCAATGCAACTGGATTGCGTTTCAAGCAGCAGAGGAGAGGGAAGAGACGGAAGAATCATGTTAATTTTTATTCCAAACGATCTCGCAGTACTTCAAATTGTAGATCGCGCAGATGGCATCTATCGCCCCCACTGTGTTGGTGAAAAAGCACAGCTAAATCAAAAGAAATGCGATTTTCAAGGTGCTCAACGGTGGCTTCCAACAAAGCCTCCACGCGCACATCCAAAAACAAAAGAATACCAAAAGAAGGAGCATTTTCTAACTCCTCAAACATCATATTACATTCCTGCACCATTCCCAGATAATTTTCAGCTTTCCAGCCTTGAATTATTCGTGTCAGTTCTTGTGGTAAATCCAAACCACACATTACAAACAGGTCCCGGAGGGCGCCCTCCACCACCATTCTTAAACACACCCTCATAATGACAAAATATCTTGCTCCTGTGTCACCTGTAGCAAATTAAGAATGGCATCATCAATTGACATGCCCTTGGCTCTAAGTTCTTCTCTAAGTTCTAGTTGTAGATACTCTCTCATATTATCACCAAACTGCTTAGCCAGAAGCCCCCCGGGAACAATAGCAGGGGACGCTACAGTGCAGTACAAGCGCAGACCTCCCCAATTGGCTCCAGCAAAAACAAGATTAGAATAAGCATACTGGGAACCACCAGTAATATCATCAAAGTTGCTGGAAATATAATCAGGCAGAGTTTCTTGTAAAAATTGAATAAAAGAAAAATTTTCCAAAGAAACATTCAAAACCGTTGGGATGCAAATACAATAGGTTACCGCGCTGCGCTCCAACATTGTTAGTTTTGAATTAGTCTGCAAAATAAAAGAAACAAGCGTCATATCATAGTAGCCTGTCGAACAGGTGGAAAAATCAGTCTTTCCATCACAAGACAAGCCACAGGGTCTCCAGCTCGACCCTCGTAAAACCTGTCATTGTGATTAAACAACAGCACCGAAAGTTCCTCGCGGTGGCCAGCATGAATAATTCTTGATGAAGCATACAATCCAGACATGTTAGCATCAGTTAAAGAGAAAAAACAGCCAACATAGCCTCTGGGTATAATTATGCTTAATTTTAAGTATAGCAAAGCCACCCCTCGCGGATACAAAGTAAAAGGCACAGGAGAATAAAAAATATAATTATTTCTCTGCTGCTGTTCAGGCAACGTTGCTCCCGGTCCCTCTAAATAGACATACAAAGCCTCATCAGCCATGGCTTACCAGGCAAAGTACAGCGGGCGCACAAAGCACAAGCTCTAAAGAAGCTCTAAAAACACTCTCCAACCTCTCCACAATATATACACAAGCCCTAAACTGACGTAATGGGAGTAAAGTGAAAAAAAATACCGCCAAGCCCAACACACACCCCGAAACTGCGTCAGCAGGAAAAAGTACAGTTTCACTTCCGCATTCCCAACAAGCGTAACTTCCTCTTTCTCATGGTACGTCACATCCGATTAACTTGCAACGTCATTTTCCCACGGTCGCGCCGCCCCTTTTAGCCGTTAACCCCGCAGCCAATCACCACACAGCGCGCACTTTTTTAAATTACCTCATTTACATGTTGGCACCATTCCATCTATAAGGTATATTATATAGAT

SEQ ID NO: 2 - protein, 35346 aa, Homo sapiens
CATCATCAATAATATACCTTATAGATGGAATGGTGCCAATATGTAAATGAGGTGATTTTAAAAATTGTGGGGTGTGTGGTGATTGGCTGTGGGGTTAACGGCTAAACGGGGCGGCGCGGCCGTGGGAAAATGACGTTTTGTGGGGGTGGAGTTTTTTTGCAAGTTGTCGCGGGAAATGTGACGCATAAAAAGGCTTTTTTTCTCACGGAACTACTGACTTTTCCCACGGTATTTAACAGGAAATGAGGTAGTTTTGACCGGATGCAAGTGAAAATTGCTGATTTGCGCGCGAAAACTGAATGAGGAAGTGTTTTTCTGAATAATGTGGTATTTATGGCAGGGTGGAGTATTTGTTCAGGGCCAGGTAGACTTTGACCCATTACGTGGAGGTTTCGATTACCGTGTTTTTTACCTGAATTTCCGCGTACCGTGTCAAAGTCTTCTGTTTTTACGTAGGTGTCAGCTGATCGCTACGGTATTTATACCTCAGGGTTTGTGTCAAGAGGCCACTCTTGAGTGCCAGCGAGAAGAGTTTTCTCCTCTGCGCCGGCAGTTTAATAATAAAAAAATGAGAGATTTGCGATTTCTGCCTCAGGAAATAATTTCTGCTGAGACTGGAAATGAAATACTGGAGCTTGTGGTGCACGCCCTGATGGGAGACGATCCGGAGCCACCTGTGCAGCTTTTTGAGCCTCCTACGCTTCAGGAACTGTATGATTTAGAGGTAGAGGGATCGGAGGATTCTAATGAGGAAGCTGTGAATGGCTTTTTTACCGATTCTATGCTTTTAGCTGCTAATGAAGGATTAGAATTAGATCCGCCTTTGGACACTTTCGATACTCCAGGGGTGATTGTGGAAAGCGGTACAGGTGTAAGAAAATTACCTGATTTGGGTTCCGTGGACTGTGATTTGCACTGCTATGAAGACGGGTTTCCTCCGAGTGATGAGGAGGACCATGAAAAGGAGCAGTCTATGCAGACTGCAGCGGGTGAGGGAGTGAAGGCTGCCAGTGTTGGTTTTCAGTTGGATTGCCCGGAGCTTCCTGGACATGGCTGTAAGTCTTGTGAATTTCACAGGAAAAATACTGGAGTAAAGGAACTGTTATGTTCGCTTTGTTATATGAGAGCGCACTGCCACTTTATTTACAGTAAGTGTGTTTAAGTTAAAATTTAAAGGAATATGCTGTTTTTCACATGTATATTGAGTGGGAGTTTTGTGCTTCTTATTATAGGTCCTGTGTCTGATGCTGATGAGTCACCATCTCCTGATTCTACTACCTCACCTCCTGAGATTCAAGCACCTGTTCCTGTGGACGTGCGCAAGCCCATTCCTGTGAAGCTTAAGCCTGGGAAACGTCCAGCAGTGGAAAAACTTGAGGACTTGTTACAGGGTGGGGACGGACCTTTGGACTTGAGTACACGGAAACGGCCAAGACAATAAGTGTTCCATATCCGTGTTTACTTAAGGTGACGTCAATATTTGTGTGAGAGTGCAATGTAATAAAAATATGTTAACTGTTCACTGGTTTTTATTGCTTTTTGGGCGGGGACTCAGGTATATAAGTAGAAGCAGACCTGTATGGTTAGCTCATAGGAGCTGGCTTTCATCCATGGAGGTTTGGGCCATTTTGGAAGACCTTAGAAAGACTAGGCAACTGTTAGAGGACGCTTCGGACGGAGTCTCCGGTTTTTGGAGATTCTGGTTCGCTAGTGAATTAGCTAGGGTAGTTTTTAGGATAAAACAGGACTATAAAGAAGAATTTGAAAAGTTGTTGGTAGATTGCCCAGGACTTTTTGAAGCTCTTAATTTGGGCCATCAAGTTCACTTTAAAGAAAAAGTEBKMDTTTATCAGTTTTAGACTTTTCAACCCCAGGTAGAACTGCCGCTGCTGTGGCTTTTCTTACTTTTATATTAGATAAATGGAPADSFQQGIRFGFRSHSIVENMEGSQTCCCGCAGACTCATTTCAGCAGGGGATACGTTTTGGATTTCGTAGCCACAGCATTGTGGAGAACATGGAAGGTTCGCAAGDEDNLRLLASAAFGCSGNPEASTGHASATGAGGACAATCTTAGGTTACTGGCCAGTGCAGCCTTTGGGTGTAGCGGGAATCCTGAGGCATCCACCGGTCATGCCAGCGSGGGTARGQPESRPGPSSGGGGVADLGGTTCTGGAGGAGGAACAGCAAGAGGACAACCCGAGAGCCGGCCTGGACCCTCCAGTGGAGGAGGCGGAGTAGCTGACTTSPELQRVLTGSTSTGRDRGVKRERASGTCTCCTGAACTGCAACGGGTGCTTACTGGATCTACGTCCACTGGACGGGATAGGGGCGTTAAGAGGGAGAGGGCATCTASGTDARSELALSLMSRRRPETIWWHEVGTGGTACTGATGCTAGATCTGAGTTGGCTTTAAGTTTAATGAGTCGCAGACGTCCTGAAACCATTTGGTGGCATGAGGTCQKEGRDEVSVLQEKYSLEQVKTCWLEPCAGAAAGAGGGAAGGGATGAAGTTTCTGTATTGCAGGAGAAATATTCACTGGAACAGGTGAAAACATGTTGGTTGGAGCCEDDWEVAIKNYAKIALRPDKQYKITRTGAGGATGATTGGGAGGTGGCCATTAAAAATTATGCCAAGATAGCTTTGAGGCCTGATAAACAGTATAAGATTACTAGACRINIRNACYISGNGAEVVIDTQDKAVIGGATTAATATCCGGAATGCTTGTTACATATCTGGAAATGGGGCTGAGGTGGTAATAGATACTCAAGACAAGGCAGTTATTRCCMMDMWPGVVGMEAVTFVNVKFRGDAGATGCTGCATGATGGATATGTGGCCTGGAGTAGTCGGTATGGAAGCAGTAACTTTTGTAAATGTTAAGTTTAGGGGAGAGYNGIVFMANTKLILHGCSFFGFNNTTGGTTATAATGGAATAGTGTTTATGGCCAATACCAAACTTATATTGCATGGTTGTAGCTTTTTTGGTTTCAACAATACCTCVDAWGQVSVRGCSFYACWIATAGRTKGTGTAGATGCCTGGGGACAGGTTAGTGTACGGGGATGTAGTTTCTATGCGTGTTGGATTGCCACAGCTGGCAGAACCAAGSQLSLKKCIFQRCNLGILNEGEARVRHAGTCAATTGTCTCTGAAGAAATGCATATTCCAAAGATGTAACCTGGGCATTCTGAATGAAGGCGAAGCAAGGGTCCGCCACASTDTGCFILIKGNASVKHNMICGACTGCGCTTCTACAGATACTGGATGTTTTATTTTAATTAAGGGCAATGCCAGCGTAAAGCATAACATGATTTGCGGTGCTTSDERPYQMLTCAGGHCNMLATVHIVSHCCGATGAGAGGCCTTATCAAATGCTCACTTGTGCCGGTGGGCATTGTAATATGCTGGCTACTGTGCATATTGTTTCCCATQRKKWPVFDHNVLTKCTMHAGGRRGMFCAACGCAAAAAATGGCCTGTTTTTGATCACAATGTGTTGACCAAGTGTACCATGCATGCAGGTGGGCGTAGAGGAATGTTMPYQCNMNHVKVLLEPDAFSRMSLTGTATGCCTTACCAGTGTAACATGAATCATGTGAAAGTGTTGTTGGAACCAGATGCCTTTTCCAGAATGAGCCTAACAGGAAIFDMNMQIWKILRYDDTRSRVRACECGTCTTTGACATGAACATGCAAATCTGGAAGATCCTGAGGTATGATGATACGAGATCGAGGGTGCGCGCATGCGAATGCGGAGKHARFQPVCVDVTEDLRPDHLVIARTGGCAAGCATGCCAGGTTCCAGCCGGTGTGTGTAGATGTGACTGAAGATCTGAGACCGGATCATTTGGTTATTGCCCGCACGAEFGSSGEETDTGGAGCAGAGTTCGGATCCAGTGGAGAAGAAACTGACTAAGGTGAGTATTGGGAAAACTTGGGGTGGGGTTTTCAGATGGACAGATTGAGTAAAAATTTGTTTTTTCTGTCTTTCAGCTGTCATGAGTGGAAACGCTTCTTTTAAGGGGGGAGTCTTCAGCCCTTATCTGACAGGGCGTCTCCCATCCTGGGCAGGAGTTCGTCAGAATGTTATGGGATCTACTGTGGATGGAAGACCCGTCCAACCCGCCAATTCTTCAACGCTGACCTATGCTACTTTAAGTTCTTCACCTTTGGACGCAGCTGCAGCCGCCGCCGCCGCCTCTGTTGCCGCTAACACTGTGCTTGGAATGGGTTACTATGGAAGTATCGTGGCTAATTCCACTTCCTCTAATAACCCTTCTACCCTGACTCAGGACAAGTTACTTGTCCTTTTGGCCCAGCTGGAGGCTTTGACCCAACGTCTGGGTGAACTTTATCAGCAGGTGGCCGAGTTGCGAGTACAAACTGAGTCTGCTGTCGGCACGGCAAAGTCTAAATAAAAAAAAATTCCACAATCAATGAATAAATAAACGAGCTTGTTGTTGATTTAAAATCAAGTGTTTTTATTTCATTTTTCGCGCACGGTATGCCCTAGACCACCGATCTCGATCATTGAGAACACGGTGGATTTTTTCCAGAATCCTATAGAGGTGGGATTGAATGTTTAGATACATGGGCATTAGGCCATCTTTGGGGTGGAGATAGCTCCATTGAAGGGATTCATGCTCCGGGGTAGTGTTGTAAATCACCCAGTCATAACAAGGTCGCAGTGCATGGTGTTGCACAATATCTTTTAGAAGTAGGCTGATTGCCACAGATAAGCCCTTGGTGTAGGTGTTTACAAACCGGTTGAGCTGGGAGGGGTGCATTCGGGGTGAAATTATGTGCATTTTGGATTGGATTTTTAAGTTGGCAATATTGCCGCCAAGATCTCGTCTTGGGTTCATGTTATGAAGGACCACCAAGACGGTGTATCCGGTACATTTAGGAAATTTATCGTGTAGCTTGGATGGAAAAGCGTGGAAAAATTTGGAGACACCCTTGTGTCCTCCGAGATTTTCCATGCACTCATCCATGATAATAGCAATGGGGCCGTGGGCAGCAGCGCGGGCAAACACGTTCCGTGGGTCTGACACATCATAGTTATGTTCCTGAGTTAAATCATCATAAGCCATTTTAATGAATTTGGGGCGGAGAGTACCCGATTGGGGTATGAATGTTCCTTCGGGCCCCGGAGCATAGTTCCCCTCACAGATTTGCATTTCCCAAGCTTTCAGTTCCGATGGTGGAATCATGTCCACCTGGGGGGCTATGAAGAACACCGTTTCTGGGGCGGGGGTGATTAGTTGGGATGATAGCAAGTTTCTGAGCAATTGAGATTTGCCACATCCGGTGGGGCCATAAATGATTCCGATTACAGGTTGCAGGTGGTAGTTTAGGGAACGGCAACTGCCGTCTTCTCGAAGCAAGGGGGCCACCTCGTTCATCATTTCCCTTACATGCATATTTTCCCGCACCAAATCCATTAGGAGGCGCTCTCCTCCTAGTGATAGAAGTTCTTGTAGTGAGGAAAAGTTTTTCAGCGGTTTTAGACCGTCAGCCATGGGCATTTTGGAGAGAGTTTGCTGCAAAAGTTCTAGTCTGTTCCACAGTTCAGTGATGTGTTCTATGGCATCTCGATCCAGCAGACCTCCTCGTTTCGCGGGTTTGGACGGCTCCTGGAGTAGGGTATGAGACGATGGGCGTCCAGCGCTGCCAGGGTTCGGTCCTTCCAGGGTCTCAGTGTTCGAGTCAGGGTTGTTTCCGTCACAGTGAAGGGGTGTGCGCCTGCTTGGGCGCTTGCCAGGGTGCGCTTCAGACTCATTCTGCTGGTGGAGAACTTCTGTCGCTTGGCGCCCTGTATGTCGGCCAAGTAGCAGTTTACCATGAGTTCGTAGTTGAGCGCCTCGGCTGCGTGGCCTTTGGCGCGGAGCTTACCTTTGGAAGTTTTCTTGCATACCGGGCAGTATAGGCATTTCAGCGCATACAGCTTGGGCGCAAGGAAAATGGATTCTGGGGAGTATGCATCTGCGCCGCAGGAGGCGCAAACAGTTTCACATTCCACCAGCCAGGTTAAATCCGGTTCATTGGGGTCAAAAACAAGTTTTCCGCCATATTTTTTGATGCGTTTCTTACCTTTGGTCTCCATGAGTTCGTGTCCTCGTTGAGTGACAAACAGGCTGTCCGTATCCCCGTAGACTGATTTTACAGGCCTCTTCTCCAGTGGAGTGCCTCGGTCTTCTTCGTACAGGAACTCTGACCACTCTGATACAAAGGCGCGCGTCCAGGCCAGCACAAAGGAGGCTATGTGGGAGGGGTAGCGATCGTTGTCAACCAGGGGGTCCACCTTTTCCAAAGTATGCAAACACATGTCACCCTCTTCAACATCCAGGAATGTGATTGGCTTGTAGGTGTATTTCACGTGACCTGGGGTCCCCGCTGGGGGGGTATAAAAGGGGGCGGTTCTTTGCTCTTCCTCACTGTCTTCCGGATCGCTGTCCAGGAACGTCAGCTGTTGGGGTAGGTATTCCCTCTCGAAGGCGGGCATGACCTCTGCACTCAGGTTGTCAGTTTCTAAGAACGAGGAGGATTTGATATTGACAGTGCCGGTTGAGATGCCTTTCATGAGGTTTTCGTCCATTTGGTCAGAAAACACAATTTTTTTATTGTCAAGTTTGGTGGCAAATGATCCATACAGGGCGTTGGATAAAAGTTTGGCAATGGATCGCATGGTTTGGTTCTTTTCCTTGTCCGCGCGCTCTTTGGCAGCGATGTTGAGTTGGACATACTCGCGTGCTAGGCACTTCCATTCGGGGAAGATAGTTGTCAATTCATCTGGCACGATTCTCACTTGCCACCCTCGATTATGCAAGGTAATTAAATCCACACTGGTGGCCACCTCGCCTCGAAGGGGTTCGTTGGTCCAACAGAGCCTACCTCCTTTCCTAGAACAGAAAGGGGGAAGTGGGTCTAGCATAAGTTCATCGGGAGGGTCTGCATCCATGGTAAAGATTCCCGGAAGTAAATCCTTATCAAAATAGCTGATGGGAGTGGGGTCATCTAAGGCCATTTGCCATTCTCGAGCTGCCAGTGCACGCTCATATGGGTTAAGGGGACTGCCCCAGGGCATGGGATGGGTGAGTGCAGAGGCATACATGCCACAGATGTCATAGACGTAGATGGGATCCTCAAAGATGCCTATATAGGTTGGATAGCATCGCCCCCCTCTGATACTTGCTCGCACATAGTCATATAGTTCATGTGATGGCGCTAGCAACCCCGGACCCAAGTTGGTGCGATTGGGTTTTTCTGTTCTGTAGACAATCTGGCGAAAGATGGCGTGAGAATTGGAAGAGATGGTGGGTCTTTGAAAAATGTTGAAATGGGCATGAGGTAGACCTACAGAGTCTCTGACAAAAGTGGGCATAAGATTCTTGAAGCTTGGTTACCAGTTCGGCGGTGACAAGTACGTCTAGGGCGCAGTAGTCAAGTGTTTCTTGAATGATGTCATAACCTGGTTGGTTTTTCTTTTCCCACAGTTCGCGGTTGAGAAGGTATTCTTCGCGATCCTTCCAGTACTCTTCTAGCGGAAACCCGTCTTTGTCTGCACGGTAAGATCCTAGCATGTAGAACTGATTAACTGCCTTGTAAGGGCAGCAGCCCTTCTCTACGGGTAGAGAGTATGCTTGAGCAGCTTTTCGCAGCGAAGCGTGAGTAAGGGCGAAGGTGTCTCTGACCATGACTTTGAGAAATTGGTATTTGAAGTCCATGTCGTCACAGGCTCCCTGTTCCCAGAGTTGGAAGTCTACCCGTTTCTTGTTAGGCGGGGTTGGGCAAAGCGAAAGTAACATCGTTGAAGAGAATCTTACCGGCTCTGGGCATAAAATTGCGAGTGATGCGGAAAGGCTGTGGTACTTCCGCTCGATTGTTGATCACCTGGGCAGCTAGGACGATCTCGTCGAAACCGTTGATGTTGTGTCCTACGATGTATAATTCTATGAAACGCGGCGTGCCTTTGACGTGAGGTAGCTTATTGAGCTCATCAAAGGTTAGGTCTGTAGGGTCAGATAAGGCGTAGTGTTCGAGAGCCCATTCGTGCAGGTGAGGATTTGCATGTAGGAATGATGACCAAAGATCCACCGCCAGTGCTGTTTGTAACTGGTCCCGATACTGACGAAAATGCTGGCCAATTGCCATTTTTTCTGGAGTGACACAGTAGAAGGTTCTGGGGTCTTGTTGCCATCGATCCCACTTTAGTTTAATGGCTAGATCGTGGGCCATGTTGACGAGACGCTCTTCTCCTGAGAGTTTCATGACCAGCATGAAAGGAACTAGTTGTTTGCCAAAGGACCCCATCCAGGTGTAAGTTTCCACATCGTAGGTCAGGAAGAGTCTTTCTGTGCGAGGATGAGAGCCGATCGGGAAGAACTGGATTTCCTGCCACCAGTTGGAGGATTGGCTGTTGATGTGATGGAAGTAGAAGTTTCTGCGGCGCGCCGAGCATTCGTGTTTGTGCTTGTACAGACGGCCGCAGTAGTCGCAGCGTTGCACGGGTTGTATCTCGTGAATGAGCTGTACCTGGCTTCCCTTGACGAGAAATTTCAGTGGGAAGCCGAGGCCTGGCGATTGTATCTCGTGCTCTTCTATATTCGCTGTATCGGCCTGTTCATCTTCTGTTTCGGTGGTGGTCATGCTGACGAGCCCCCGCGGGAGGCAAGTCCAGACCTCGGCGCGGGAGGGGCGGAGCTGAAGGACCAGAGCGCGCAGGCTGGAGCTGTCCAGAGTCCTGAGACGCTGCGGACTCAGGTTAGTAGGTAGGGACAGAAGATTAACTTGCATGATCTTTTCCAGGGCGTGCGGGAGGTTCAGATGGTACTTGAATTTCCACAGGTTCGTTTGTAGAGATGTCAGATGGCTTGCAGGGTTCCGTGTCCTTTGGGCGCCACTACCGTACCTTTGTTTTTTCTTTTGATCGGTGGTGGCTCTCTTGCTTCTTGCATGCTCATGAAGCGATGACGGGGACGCGCGCCGGGCGGAAGCGGTTAGTTCCGGACCCGGAGGCATGGCTGGTAGTGGCACGTCGGCGCCGCGCACGGGCAGGTTCTGGTACTGCGCTCTGAGAAGACTTGCGTGCGCCACCACGCGTCGATGGACGTCTTGTATCTGACGTCGTCTGGGTGAAAGCTACCGGCCCCGTGAGCTTGAACCTGAAAGAGAGTTCAACAGAATCAATTTCGGTATCGTTAACGGCAGCTTGTCTCAGTATTTCTTGTACGTCACCAGAGTTGTCCTGGTAGGCGATCTCCGCCATGAACTGCTCGATTTCTTCCTCCTGAAGATCTCCGCGACCCGCTCTCTCGACGGTGGCCGCGAGGTCATTGGAGATACGGCCCATGAGTTGGGAGAATGCAGTCATGCCCGCCTCGTTCCAGACGCGGCTGTAAACCACGGCCCCCTCGGAGTCTCTTGCGCGCATCACCACCTGAGCGAGGTTAAGCTCCACGTGTCTGGTGAAGACCGCATAGTTGCATAGGCGCTGAAAAAGGTAGTTGAGTGTGGTGGCAATGTGTTCGGCGACGAAGAAATACATGATCCATCGTCTCAGCGGCATTTCGCTGACATCGCCCAGAGCTTCCAAGCGCTCCATGGCCTCGTAGAAGTCCACGGCAAAATTAAAAAACTGGGAGTTTCGCGCGGACACGGTCAATTCCTCCTCGAGAAGACGGATGAGTTCGGCTATGGTGGCCCGTACTTCGCGTTCGAAGGCTCCCGGGATCTCTTCTTCCTCTTCTATCTCTTCTTCCACTAACATCTCTTCTTCGTCTTCAGGCGGGGGCGGAGGGGGCACACGGCGACGTCGACGGCGCACGGGCAAACGGTCGATGAATCGTTCAATGACCTCTCCGCGGCGGCGGCGCATGGTTTCAGTGACGGCGCGGCCGTTCTCGCGCGGTCGCAGAGTAAAAACACCGCCGCGCATCTCCTTAAAGTGGTGACTGGGAGGTTCTCCGTTTGGGAGGGAGAGGGCGCTGATTATACATTTTATTAATTGGCCCGTAGGGACTGCGCGCAGAGATCTGATCGTGTCAAGATCCACGGGATCTGAAAACCTTTCGACGAAAGCGTCTAACCAGTCACAGTCACAAGGTAGGCTGAGTACGGCTTCTTGTGGGCGGGGGTGGTTATGTGTTCGGTCTGGGTCTTCTGTTTCTTCTTCATCTCGGGAAGGTGAGACGATGCTGCTGGTGATGAAATTAAAGTAGGCAGTTCTAAGACGGCGGATGGTGGCGAGGAGCACCAGGTCTTTGGGTCCGGCTTGCTGGATACGCAGGCGATTGGCCATTCCCCAAGCATTATCCTGACATCTAGCAAGATCTTTGTAGTAGTCTTGCATGAGCCGTTCTACGGGCACTTCTTCCTCACCCGTTCTGCCATGCATACGTGTGAGTCCAAACCCGCGCATTGGTTGTACCAGTGCCAAGTCAGCTACGACTCTTTCGGCGAGGATGGCTTGCTGTACTTGGGTGAGGGTGGCTTGAAAGTCATCAAAATCCACAAAGCGGTGGTAAGCCSCGGTATTAATGGTGTAAGCACAGTTGGCCATGACTGACCAGTTAACTGTCTGGTGACCAGGGCGCACGAGCTCGGTGTATTTAAGGCGCGAATAGGCGCGGGTGTCAAAGATGTAATCGTTGCAGGTGCGCACCAGATACTGGTAACCTATAAGAAAATGCGGCGGTGGTTGGCGGTAGAGAGGCCATCGTTCTGTAGCTGGAGCGCCGGGGGCGAGGTCTTCCAACATAAGGCGGTGATAGCCGTAGATGTACCTGGACATCCAGGTGATTCCTGCGGCGGTAGTAGAAGCCCGAGGAAACTCGCGTACGCGGTTCCAAATGTTGCGTAGCGGCATGAAGTAGTTCATTGTAGGCACGGTTTTGACCAGTGAAGGCGCGCGCAGTCATTGATGCTCTATAGACACGGAGACAAATGAAAGCGTTCAGCGACTCGACTCCGTAGCCTGGAGGGACGTGAACGGGTTGGGTCGCGGTGTACCCCGGTTCGAGNACTTGTACTCGAGCCGGCCGGAGCCGCGGCGTAACGTGGTATTGGCACTCCCGTCTCGACCCAGCCTACAAAAAATCCAGGATACGGAATCGAGTCGTTTTGCTGGTTGCCGAATGGCAGGGAAGTGAGTCCTATTTTTTTTTTTTGCCGCTCAGATGCATCCCGTGCTGCGACAGATGCGTCCCCAACAACAGCCCCCCTCGCAGCAGCAGCAACCACAAAAGGCTGTCCCTGCAACTACTGCAACTGCCGCTGTGAGCGGTGCGGGACAGCCCGCCTATGATCTGGACTTGGAAGAGGGCGAAGGACTGGCACGTCTAGGTGCGCCTTCGCCCGAGCGGCATCCGCGAGTTCAACTGAAAAAAGATTCTCGCGAGGCGTATGTGCCCCAACAGAACCTATTTAGAGACAGAAGCGGCGAGGAGCCGGAGGAGATGCGAGCTTCCCGCTTTAACGCGGGTCGTGAGCTGCGTCACGGTTTGGACAGAAGACGAGTGTTGCGGGACGAGGATTTCGAAGTTGATGAAGTGACAGGGATCAGTCCTGCCAGGGCACACGTGGCTGCAGCCAACCTTGTATCGGCTTACGAACAGACAGTAAAGGAAGAGCGTAATTTCCAAAAGTCTTTTAATAATCATGTGCGAACCCTCATTGCCCGCGAAGAAGTCACCCTTGGTTTGATGCATTTGTGGGATTTGATGGAAGCTATCATTCAGAACCCTACTAGCAAACCTCTGACCGCACAGCTGTTTCTGGTGGTGCAACACAGCAGAGACAATGAGGCTTTCAGAGAGGCGCTGCTCAACATCACCGAACCCGAGGGGAGATGGTTGTATGATCTTATCAACATTCTACAGAGTATCATAGTGCAGGAGCGGAGCCTGGGCCTGGCCGAGAAGGTGGCTGCCATCAATTACTCGGTTTTGAGCTTGGGAAAGTATTACGCTCGCAAGATCTACAAGACTCCATACGTTCCCATAGACAAGGAGGTGAAGATAGATGGGTTCTACATGCGCATGACGCTGAAGGTGTTGACCCTGAGCGATGATCTTGGGGTGTACCGCAATGACAGAATGCATCGCCCGGTGAGCGCCAGCAGGAGGCGCGAGTTAAGCGACAGGGAACTGATGCACAGTTTGCAAAGAGCTCTAACTGGAGCTGGAACCGAGGGTGAGAATTACTTTGATATGGGAGCTGACTTGCAGTGGCAGCCTAGTCGCAGGGCTCTGAACGCCGCGACGGCAGGATGTGAGCTTCCTTACATAGAAGAGGCGGATGAAGGCGAGGAGGAAGAGGGCGAGTACTTGGAAGACTGATGGCACAACCCGTGTTTTTTGCTAGATGGAACAGCAAGCACCGGATCCCGCAATGCGGGCGGCGCTGCAGAGCCAGCCGTCCGGCATTAACTCCTCGGACGATTGGACCCAGGCCATGCAACGTATCATGGCGTTGACGACTCGCAACCCCGAAGCCTTTAGACAGCAACCCCAGGCCAACCGTCTATCGGCCATCATGGAAGCTGTAGTGCCTTCCCGCTCTAATCCCACTCATGAGAAGGTCCTGGCCATCGTGAACGCGTTGGTGGAGAACAAAGCTATTCGTCCAGATGAGGCCGGACTGGTATACAACGCTCTCTTAGAACGCGTGGCTCGCTACAACAGTAGCAATGTGCAAACCAATTTGGACCGTATGATAACAGATGTACGCGAAGCCGTGTCTCAGCGCGAAAGGTTCCAGCGCGATGCCAACCTGGGTTCGCTGGTGGCGTTAAATGCTTTCTTGAGTACTCAGCCTGCTAATGTGCCGCGTGGTCAACAGGATTATACTAACTTTTTAAGTGCTTTGAGACTGATGGTATCAGAAGTACCTCAGAGCGAAGTATATCAGTCCGGTCCTGATTACTTCTTTCAGACTAGCAGACANGGCTTNGCAGACGGTAAATCTGAGCCAAGCTTTTATAAAACCTATAAAGGTTTGTGGGGAGTGCATGCCCCGGTAGGAGAAAGAGCAACCGTGTCTAGCTTAGTTAACTCCGAACTCCCGCCTATTATTACTGATGGTAGCTCCTTTCACACGACAGCGGTAGCATCGACCGTAATTCCTATTTGGGTTACCTACTANAACCTGTATCGCGAAGCCATAGGGCAAAGTCAGGTGGACGAGCAGACCNTATCAAGAAATTACCCAAGTCAGTCGCGCTTTGGGACAGGAAGACACTGGCAGNTTTGGAAGCCACTCTGAACTTCTTGCTTACCAATCGGTCTCAAANAGATCCCTCCTCCNATATGCTGCTTACTGCGGAGGAGGAGAGGATCCTTAGATATGTGCAGCAGAGACGTGGGATTGTTTCTGATGCAAGAGGGGGCNACTCCGACTGCAGCACTGGACATGACAGCGCGAAATATGGAGCCCAGCATGTATGCCAGTAACCGACCTTTCATTAACAAACTGCTGGACTACTTGCACAGAGCTGCCGCTATGAACTCTGATTATTTCACCAATGCCATCTTAAACCCGCACTGGCTGCCCCCACCTGGTTTCTACACGGGCGAATATGACATGCCCGACCCTAATGACGGATTTCTGTGGGACGACGTGGACAGCGATGTTTTTTCACCTCTTTCTGATCATCGCACGTGGAAAAAGGAAGGCGGCGATAGAATGCATTCTTCTGCATCGCTGTCCGGGGTCATTGGTGCTACCGCGGCTGAGCCCGAGTCTGCAAGTCCTTTTCCTAGTCTACCCTTTTCTCTACACAGTGTACGTAGCAGCGAAGTGGGTAGAATAAGTCGCCCGAGTTTAATGGGCGAAGAGGAGTACCTAAACGATTCCTTGCTCAGACCGGCAAGAGAAAAAAATTTCCCAAACAATGGAATAGAAAGTTTGGTGGATAAAATGAGTAGATGGAAGACTTATGCTCAGGATCACAGAGACGAGCCTGGGATCATGGGGACTACAAGTAGAGCGAGCCGTAGACGCCAGCGCCATGACAGACAGAGGGGTCTTGTGTGGGACGATGAGGATTCGGCCGATGATAGCAGCGTATTGGACTTGGGTGGGAGAGGAAGGGGCAACCCGTTTGCTCATTTGCGCCCTCGCTTGGGTGGTATGTTGTAAAAAAAAATAAAAAAGAAAAAACTCACCAAGGCCATGGCGACGAGCGTACGTNCGTTCTTCTTTATTATCTGTGTCTAGTATAATGAGGCGAGTCGTGCTAGGCGGAGCGGTGGTGTATCCGGAGGGTCCTCCTCCTTCGTACGAGAGCGTGATGCAGCAGCAGCAGGCGACGGCGGTGATGCAATCCCCACTGGAGGCTCCCTTTGTGCCTCCGCGATACCTGGCACCTACGGANGGCAGAAACAGCATTCGTTACTCGGAACTGGCACCTCAGTACGATACCACCAGGTTGTATCTGGTGGACNACAAGTCGGCGGACATTGCTTCTCTGAACTATCAGAATGACCACAGCAACTTCTTGACCACGGTGGTGCAAAACAATGACTTTACCCCTACGGAAGCCAGCACCCAGACCATTAACTTTGATGAACGATCGCGGTGGGGCGGTCAGCTAAAAACCATCATGCATACTAACATGCCCAACGTGAACGAGTATATGTTTAGTAACAAGTTCAAAGCGCGTGTGATGGTGTCCAGAAAACCTCCTGAGGGTGTTAGAGTAGACGATAATTATGATCATAAGCAAGATATTCTAAAATACGAGTGGTTCGAGTTTACTTTGCCAGAAGGCAACTTTTCGGTCACTATGACTATCGACTTGATGAACAATGCCATCATAGACAATTACTTGAAAGTGGGCAGACAGAATGGAGTGTTGGAAAGTGACATTGGTGTTAAGTTCGACACTAGGAACTTCAAGTTGGGATGGGATCCAGAAACTAAGTTGATCATGCCTGGGGTTTACACCTATGAGGCCTTCCATCCTGACATCGTATTGCTGCCTGGCTGCGGAGTGGACTTTACCGAAAGCCGTCTGAGCAACCTTCTTGGCATTAGAAAGAAACACCCATTCCAAGAGGGTTTTAAGATCTTGTATGAGGATTTAGAAGGAGGAAATATTCCAGCCCTTTTGGATGTAGATGCTTATGAGAACAGCAAGAAAGATCAAAAAGCCAAAATAGAAGCTGCTGCAGAAGCTAAAGCAAACATAGTTGCCAACGATCCGGTAAGGGTGGCTAACGCTAGTGAAATCAGGGGAGACAGTTTTGCCGCAACATCCGTTCCGACTAAAGAATCATTATTGGATGATGTGTCTCAAAACATAGAGTTAAAACTCACTATTAAGCCTGTGGAAAAAGATGGCAAAAACAGAAGTTACAATGTGTTGGAAGATAAAATCAACACGGCCTATCGCAGTTGGTACCTTTCGTACAATTATGGCGACCCCGAAAAAGGAGTGCGTTCCTGGACATTGCTCACCACCTCAGATGTCACCTGCGGAGCGGAGCAGGTCTACTGGTCGCTTCCAGACATGATGCAGGATCCTGTCACTTTCCGCTCCACTAGACAAGTCAGTAACTACCCTGTGGTGGGTGCAGAGCTTATGCCCGTCTTTTCAAAGAGCTTCTACAACGAACAAGCTGTGTACTCCCAGCAGCTCCGCCAGTCCACCTCGCTTACGCACGTCTTCAACCGCTTTCCTGAGAACCAGATTTTAATCCGTCCGCCGGCGCCCACAATTACCACCGTCAGTGAAAACGTTCCTGCTCTCACAGATCACGGGACCCTGCCGTTGCGCAGCAGTATCCGGGGAGTCCAACGTGTGACCGTTACTGACGCCAGACGCCGCACCTGTCCCTACGTGTACAAGGCACTGGGCATAGTCGCACCGCGCGTCCTTTCAAGCCGCACTTTCTAAAAAAAAAAAAAAAATGTCCGTTCTTATCTCGCCCAGTAATAACACCGGTTGGGGTCTGCGCGCTCCCAGCAAGATGTACGGAGGCGCACGCAAACGTTCTACCCAACATCCCGTGCGTGTTCGCGGGCATTTTCGCGCTCCATGGGGTGCCCTCAAGGGCCGCACTCGCGTTCGAACCACCGTCGATGATGTAATCGATCAGGTGGTTGCCGACGCCCGTAATTATACTCCTACTGCGCCTACATCTACTGTGGACGCAGTTATTGACAGTGTAGTGGCTGACGCTCGCAACTATGCTCGACGTAAGAGCCGGCGAAGGCGCATTGCCAGACGTCACCGAGCTACCACTGCCATGCGAGCAGCAAGAGCTCTGCTACGAAGAGCTAGACGCGTGGGGCGAAGAGCCATGCTTAGGGCGGCCAGACGTGCAGCTTCGGGCGCCAGCGCCGGCAGGTCCCGCAGGCAAGCAGCCGCTGTCGCAGCGGCGACTATTGCCGACATGGCCCAATCGCGAAGAGGCAATGTATACTGGGTGCGTGACGCTGCCACCGGTCAACGTGTACCCGTGCGCACCCGTCCCCCTCGCACTTAGAAGATACTGAGCAGTCTCCGATGTTGTGTCCCAGCGGCGAGGATGTCCAAGCGCAAATACAAGGAAGAAATGCTGCAGGTTATCGCACCTGAAGTCTACGGCCAACCGTTGAAGGATGAAAAAAAACCCCGCAAAATCAAGCGGGTAAAAAAGGACAAAAAAGAAGAGGAAGATGGCGATGATGGGCTGGCGGAGTTTGTGCGCGAGTATGCCCCACGGCGACGCGTGCAATGGCGTGGGCGCAAAGTTCGACATGTGTTGAGACCTGGAACTTCGGTGGTCTTTACACCCGGCGAGCGTTCAAGCGCTACTTTTTAAGCGTTCCTATGATGAGGNTGTACGGGGATGATGATATTCTNTGAGCAGGCAGCTGACCGATTAGGCGAGTTTGCTTATGGCAAGCGTAGTAGAATAAATCCCAAGGATGAAACAGTGTCCATACCCTTGGATCATGGAAATCCCACCCCTAGTCTTAAACCGGTCACTTTGCAGCAAGTGTATACCCGTAACTCCGCGAAACAGGTGTTAAACGCGAAGGTGAAGATTTGTATCCCACTATGCAAACTGATGGTGCCCAAACGCCAGAAGTTGGAGGACGTTATTGGAGNAAAGTAAAAGTGGATCCAGATATTCTAACCTGAGGTTAAAGTGAGCCCCATTATAGCAGGTAGCGCCCTGGTCTGGGAGTACAAACTGTAAACATTAAAATTCCCACTGAAAGTATGGAAGTGCAAACTGAACCCGCAAAGCCTACTGCCACCTCCACTGAAGTGCAAACGGACCCATGGATGCCCATGCCTATTACAACTGACGCCGTCGGTCCCACTCGAAGATCCCGACRAAAGTACGGTCCAGCAAGTCTGTTGATGCCCAACTATGTCGTACACCCATCTATTATTCCTACTCCTGGTTACCGAGGCACTCGCTACTATCGCAGCCGAAACAGTACTTCCCGCCGTCGCCGCAAGACACCTGCAAATCGCAGTCGTCGCCGTAGACGCACAAGCAAACCGATTCCCGGCGCCCTGGTGCGGCAAGTGTACCGCAATGGTAGTGCGGAACCTTTGACACTGCCGCGTGCGCGTNACCATCCTAGTATCATCACTTAATCAATGTTGCCGCTGCCTCCTTGCAGATATGGCCCTCACTTGTCGCCTTCGCGTTCCCATCACTGGTTACCGAGGAAGAAACTCGCGCCGTAGAAGAGGGATGTNGGGGCGCGGAATGCGACGCTACAGGCGACGGCGTGCTATCCGCAAGCAATTGCGGGGTGGTTTTTTGCCAGCCTTAATTCCAATTATCGCTGCTGCGATTGGCGCAATACCAGGCATAGCTTCCGTGGCGGTTCAGGCCTCGCAACGACATTGACATTGGAAAAAAAAAAAACGTATAAATAAAAAATACAATGGACTCTGACACTCCTGGTACTGTGACTATGTTTTCTTAGAGATGGAAGACATCAATTTTTCATCCTTGGCTCCGCGACACGGCACGAAGCCGTACATGGGCACCTGGAGCGACATCGGCACGAGCCAACTGAACGGGGGCGCCTTCAATTGGAGCAGTATCTGGAGCGGGCTTAAAAATTTTGGCTCAACCATAAAAACATACGGGAACAATAGCTTGGAACAGCAGTACAGGACAGGCGCTTAGAAATAAACTTAAAGACCAGAACTTCCNACAAAAAGTAGTCGATGGGATAGCTTCCGGTATCNATGGAGTGGTAGATTTGGCTNACCAGGCTGTGCAGAAAAAGATAAACAGTCGTTTGGACCCGCCGCCAGCAACCCCAGGTGAAATGCAAGTGGAGGAAGANATTCCTCCGCCAGAAAAACGAGGCGACAAGCGTCCGCGTCCCGATTTGGAAGAGACGCTGGTGACGCGCGTAGATGAACCGCCTTCTTATGAGGAAGCAACGAAGCTTGGAATGCCCACCACTAGACCGATAGCCCCTATGGCCACCGGGGTGATGAAACCTTCTCAGTTGCATCGACCCGTCACCTTGGATTTGCCCCCTCCTCCTGCTGCTACTGCTGTACCCGCTTCTAAGCCTGTCGCTGCCCCGAAACCAGTCGCCGTAGCCAGGTCACGTCCCGGGGGCGCTCCTCGTCCAAATGCACACTGGCAAAATACTCTGAACAGCATCGTGGGTCTAGGCGTGCAAAGTGTAAAACGCCGTCGCTGCTTTTAATTAAATATGGAGTAGCGCTTAACTTGCCTATCTGTGTATATGTGTCATTACACGCCGTCACAGCATCAGAGGAAAAAAGGAAGAGGTCGTGCGTCGACGCTGAGTTACTTTCAAGATGGCCACCCCATCGATGCTGCCCCCATGGGCATACATGCACATCGCCGGACAGGATGCTTCGGAGTACCTGAGTCCGGGTCTGGTGCAGTTCGCCCGCGCCACAGACACCTACTTCAATCTGGGAAATAAGTTTAGAAATCCTACCGTAGCGCCGACCCACGATGTGACCACCGATCGTAGCCAGCGGCTCATGTTGCGCTTCGTGCCCGTTGACCGGGAGGACAATACATACTCTTACAAAGTGCGGTACACCCTGGCCGTGGGCGACAACAGAGTGCTGGATATGGCCAGCACGTTCTTTGACATTAGGGGCGTGTTGGACAGAGGTCCCAGTTTTAAACCCTATTCTGGTACGGCTTACAACTCCCTGGCTCCTAAAGGCGCTCCAAATGCATCTCAGTGGTTGGATAAGGGAGTTACAAGCACTGGCCTAGTGGACGACGGCAATACTGATGATGGGGAAGAAGCCAAAAAAGCAACATACACTTTTGGTAATGCTCCAGTAAAAGCCGAGGCTGAAATCACAAAAGACGGATTGCCGGTGGGCTTGGAAGTTTCAACTGAAGGTCCTAAACCAATCTATGCTGATAAGCTTTATCAGCCAGAACCTCAAGTGGGAGACGAAACTTGGACTGACCTAGACGGAAAAACCGAAGAGTATGGAGGGAGGGTTCTTAAACCTGAAACTAAAATGAAACCCTGCTACGGATCTTTTGCTAAACCTACTAATATTAAAGGAGGTCAGGCAAAGGTAAAACCAAAAGAAGACGATGGCACTAACAACATCGAGTATGACATTGACATGAACTTCTTTGACTTAAGATCACAAAGATCAGAACTCAAACCTAAAATTGTAATGTATGCAGAAAATGTGGACCTGGAATGTCCAGATACTCATGTTGTGTACAAACCTGGAGTTTCAGATGCTAGTTCTGAGACCAATCTTGGACAACAGTCTATGCCCAACAGACCCAACTACATTTGGCTTCAGAGATAACTTCATTCGGACTTATGTACTATAACAGTACTGGCAACATGGGGGTACTGGCTGGCCAAGCGTCTCAGTTGAATGCAGTGGTTGACTTGCAGGACAGAAACACAGAACTGTCTTACCAACTCTTGCTTGACTCTCTGGGCGACAGAACCAGATACTTTAGCATGTGGAATCAGGCTGTGGACAGTTATGATCCTGATGTACGTGTTATTGAAAATCATGGTGTGGAAGATGAACTTCCCAACTATTGTTTTCCGTTGGATGGTGTCGGTCCGCGAACAGATAGTTACAAGGAGATTAAGCCAAATGGAGACCAATCTACTTGGACAAATGTAGACCCAACTGGCAGCAGTGAACTTGCTAAGGGAAATCCATTTGCCATGGAAATTAACCTTCAAGCCAATCTATGGCGAAGTTTCCTTTATTCCAATGTGGCTCTATATCTCCCAGACTCGTACAAATACACCCCGTCCAATGTCACTCTTCCAGAAAACAAAAACACCTACGACTACATGAACGGGCGGGTGGTGCCGCCATCTCTAGTAGACACCTATGTGAACATTGGTGCCAGGTGGTCTCTGGATGCCATGGACAATGTCAACCCATTCAACCACCACCGTAACGCTGGCTTGCGTTACCGATCCATGCTTCTGGGTAACGGACGTTATGTGCCTTTCCACATACAAGTGCCTCAAAAATTCTTCGCTGTTAAAAACCTGCTGCTTCTCCCAGGCTCCTACACTTATGAGTGGAACTTTAGGAAGGATGTAAACATGGTTCTACAGAGTTCCCTCGGTAACGACCTACGGGTAGATGGCGCCAGCATCAGTTTTACGAGCATCAACCTCTATGCTACTTTTTTCCCCATGGCTCACAACACCGCTTCCACCCTTGAAGCCATGCTGCGGAATGACACCAATGATCAGTCATTCAACGACTACCTATCTGCAGCTAACATGCTCTACCCCATTCCTGCCAATGCAACCAATATTCCCATTTCCATTCCTTCTCGCAACTGGGCGGCTTTCAGAGGCTGGTCATTTACCAGACTGAAAACCAAAGAAACTCCCTCTTTGGGGTCTGGATATTGACCCCTACTTCGTCTATTCTGGTTCTATTCCCTACCTGGATGGTACCTTCTACCTGAACCACACTTTTAAGAAGGTTTCCATCATGTTTGACTCTTCAGTGAGCTGGCCTGGAAATGACAGGTTACTATCTCCTAACGTATTTGAAATAAAGCGCACTGTGGATGGCGAAGGCTACAACGTAGCCCAATGCAACATGACCAAAGACTGGTTCTTGGTACAGATGCTCGCCAACTACAACATCGGCTATCAGGGCTTCTACATTCCAGAAGGATACAAAGATCGCATGTATTCATTTTTCAGAAACTTCCAGCCCATGAGCAGGCAGGTGGTTGATGAGGTCAATTACAAAGACTTCAAGGCCGTCGCCATACCCTACCAACACAACAACTCTGGCTTTGTGGGTTACATGGCTCCGACCATGCGTCAAGGTCAACCCTATCCCGCTAACTATCCCTATCCACTCATTGGAACAACTGCCGTAAATAGTGTTACGCAGAAAAAGTTCTTGTGTGACAGAACCATGTGGCGCATACCGTTCTCAAGCAACTTCATGTCTATGGGAGCCCTTACAGACTTGGGACAGAACATGCTCTATGCCAACTCAGCTCATGCTCTGGACATGACCTTTGAGGTGGATCCCATGGATGAGCCCACCCTGCTTTATCTTCTCTTCGAAGTTTTCGACGTGGTCAGAGTGCATCAGCCACACCGCGGCATCATCGAGGCAGTCTACCTGCGTACACCGTTCTCGGCCGGTAACGCTACCACGTAAGAAGCTTCTTGCTTCTTGCAAACAGCAGCTGCAACCATGGCCTGCGGATCCCAAAACGGCTCCAGCGAGCAAGAGCTCAGAGCCATTGTCCAAGACCTGGGTTGCGGACCATATTTTTTGGGAACCTTTGATAAGCGCTTCCCGGGNGTTCATGGCCCCCGATAAGCTCGCCTGTGCCATTGTAAATACGGCCGGACGTGAGACGGGGGGAGAGCACTGGTTGGCTTTCGGTTGGAACCCACGTTCTAACACCTGCTACCTTTTTGATCCTTTTGGATTCTCGGATGATCGTCTCAAACAGATTTACCAGTTTGAATATGAGGGTCTCCTGCGCCGCAGCGCTCTTGCTACCAAGGACCGGTGTATTACGCTGGAAAAATCTACCCAGACCGTGCAGGGCCCCCGTTCTGCCGCCTGCGGACTTTTCTGCTGCATGTTCCTTCATGCCTTTGTGCACTGGCCTGACCGTCCCATGGACGGAAACCCCACCATGAAATTGCTAACTGGAGTGCCAAACAACATGCTTCATTCTCCTAAAGTCCAGCCCACCCTGTGTGACAATCAAAAAGCACTCTACCATTTTCTCAATACCCATTCGCCTTATTTTCGCTCTCATCGTACACACATCGAAAGGGCCACTGCGTTCGACCGTATGGATGTGCAATAATGATTCATGTAAACANACGTGTTCAATAAACAGCACTTTATTTTTTACATGTATCGAGGCTCTGGATTACTTATTTATTTACAAGTCGAATGGGTTCTGACGAGAATCAGAATGACCCGCAGGCAGTGATACGTTGCGGAACTGATACTTGGGTTGCCACTTGAATTCGGGAATCACCAACTTGGGAACCGGTATATCGGGCAGGATGTCACTCCACAGCTTTCTGGTCAGCTGCAAAGCTCCCAGCAGGTCAGGAGCCGAAATCTTGAAATCACAATTAGGACCAGTGCTCTGAGCGCGAGAGTTGCGGTACACCGGATTGCANGCACTGAAACACCATCAGCGACGGATGTCTTACGCTTGCCAGCACGGTGGGATCTGCAATCATGCCCACATCCAGCATCTTCAGCATTGGCAATGCTGAACGGGGTCATCTTGACAGGTCTGCCCTACCCATGGCGGGCACCCAATTAGGCTTGTGGTTACAATCGGCAGTGCAGGGGGATCAGTATTCATCTTGGCCTTGATCCTGTCTGATTCCTGGATACACGGCTCTCATGAAAGCATCATATTGCTTGAAAGCCCTGCTGGGCTTTACTACCCTCGGTATAAAACATCCCGCAGGACCTGCTCGAAAACTGGTTAGCTGCGCAGCCGGCATCATTCACACAGCAGCGGGCGTCATTGTTGGCTATTTGCACCACACTTCTGCCCCAGCGGTTTTGGGTGATTTTGGTTCGCTCGGGATTCTCCTTCAAGGCTCGTTGTCCGTTCTCGCTGGCCACATCCATCTCGATAATCTGCTCCTTCTGAATCATAATATTGCCATGCAAGCACTTCAGCTTGCCCTCATAATCATTGCAGCCATGAGGCCACAACGCACAGCCTGTACATTCCCAATTATGGTGGGCGATCTGAGAAAAAGAATGTATCATTCCCTGCAGAAATCTTCCCATCATCGTGCTCAGTGTCTTGTGACTAGTGAAAGTTAACTGGATGCCTCGGTGCTCCTCGTTCACGTACTGGTGACAGATGCGCTTGTATTGTTCGTGCTGCTCAGGCATTAGTTTAAAAGAGGTTCTAAGTTCGTTATCCAGCCTGTACTTCTCCATCAGCAGACACATCACTTCCATGCCTTTCTCCCAAGCAGACACCAGGGGCAAGCTAATCGGATTCTTAACAGTGCAGGCAGCAGCTCCTTTAGCCCAGAGGGTCATCTTTGGCGATCTTCTCAATGCTTCTTTTGCCATCCTTCTCAACGATGCGCACGGGCGGGTAGCTGAAACCCACTGCTACAAGTTGCGCCTCTTCTCTTTCTTCTTCGCTGTCTTGACTGATGTCTTGCATGGGGACATGTTTGGTCTTCCTTGGCTTCTTTTTCGGGGGTATCGGAGGAGGAGGACTGTCGCTCCGTTCCGGAGACAGGGAGGATTGTGACGTTTCGCTCACCATTACCAACTGACTGTCGGTAGAAGAACCTGACCCCACACGGCGACAGGTGTTTCTCTTCGGGGGCAGAGGTGGAGGCGATTGCGGAAGGGGCTGCGAGTCCGACCTGGTAAGGCGGATGACTGGCAGGAACCCCTTCCGCGTTCGTGGGGTGTGCTCCCTGTGGCGGTCGTCTTAACTGATTTMCTTCGCGGCTGGCCATTGTGTTCTCCTAGGCAGAGAAACAACAGACATGGAAACTCATGCCATTCGCTGTACAACATCGCCACGAGTGCCATCACATCTCGTCCTCAGCTGACGAGGAAAAGGAGCAGAGCTTAAGCATTCCACCGCCCAGTCGCTGCCACCACCTCTACCCTACGAAGATAAGGAGGTCGACGCATCTCATGACATGCAGAATAAACAAAGCGGAACAGAGTCTGAGCCAGACATCGAACAAGACCCGGGCTATGTGACACCGGTGGAACACGAGGAAGAGTTGAAACGCTTTCTAGAAGAGAGAGGATGAAAACTGCCCAAAACAGCAAGCGGATAACTATCACCAAGATGCTGGAAATAGGGATCAGACACCGACTACCTCATATGGCTGCACGGGGAAGACGCGCTCCTTAAACATCTAGCAAGACAGTCACTCATAGTCAAGGATGCATTATTGGACAGAACTGAAGTGCCCATCAGTGTCGAAGAGCTCAGCCGCGCCTACGAGCTTAACCTATTTTCACCTCGTACTCCCCCCAAACGTCAGCCAAACGGCACCTGCGAGCCAAATCCTCGCTTAAACTTTTATCCAGCTTTTGCTGTGCCAGAAGTACTGGCTACCTATCACATCTTTTTTAAAAATCAAAAAATTCCAGTCTCCTGCCGCGCTAATCGCACCCGCGCCGATGCCCTACTCAATCTGGGACCTGGTTCACGCTTACCTGATATAGCTTCCTTGGAAGAGGTTCCAAAGATCTTCGAGGGTCTGGGCAATAATGAGACTCGGGCCGCAAATGCTCTGCAAAAGGGAGAAAATGGCATGGATGAGCATCACAGCGTTCTGGTGGAATTGGAAGGCGATAATGCCAGACTCGCAGTACTCAAGCGAAGCGTCGAGGTCACACACTTTGCATACCCCGCTGTCAACCTGCCCCCTAAAGTCATGACGGCCGTCATGGACCAGTTACTCATTAAGCGCGCAAGTCCCCTTTCAGAAGACATGCATGACCCAGATGCCTGTGATGAGGGTAACCAGTGGTCAGTGATGAGCAGCTATCCCGATGGCTGGGCACCGACTCTCCCCGGGATTTGGAAGAGCGTCGCAAGCTTATGATGGCCGTGGTGCTGGTTACCGTAGAACTAGAGTGTCTTCGGCGTTTCTTTACCGATTCAGAAACCTTGCGCAAACTCGAAGAGAATCTGCACTACACTTTTAGACACGGCTTTGTGCGGCAGGCATGCAAGATATCTAACGTGGAACTCACCAACCTGGTTTCCTACATGGGTATTCTGCATGAGAATCGCCTAGGACAAAGCGTGCTGCACAGCACCCTTAAGGGGGAAGCCCGCCGTGATTACATCCGCGATTGTGTTTATCTCTACCTGTGCCACACGTGGCAAACCGGCATGGGTGTATGGCAGCAATGTTTAGAAGAACAGAACCTGAAAGAGCTAAACAAGCTCTTACAGAAATCTCTTAAGGTTCTGTGGACAGGGTTCGACGAGCGCACCGTCGCTTCCGACCTGGCAGACCTCATCTTCCCAGAKCGTCTCAGGGTTACTTTGCGAAACGGACTGCCTGACTTTATGAGCCAGAGCATGCTTAACAATTTTCGCTCTTTCATCCTGGAACGCTCCGGTATCCTGCCCGCCCACCTGCTGCGCACTGCCCTCCGACTTTGTGCCTCTCACCTACCGCGAATGCCCCCCGCCGCTATGGAGTCACTGCTACCTGTTCCGTCTGGCCAACTACCTCTCCTACCACTCGGATGTGATCGAGGATGTGAGCGGAGACGGCTTGCTGGAGTGTCACTGCCGCTGCAATCTGTGCACGCCCCACCGGTCCCTAGCTTGCAACCCCCAGTTGATGAGCGAAACCCAGATAATAGGCACCTTTGAATTGCAAGGCCCCAGCAGCCAAGGCGATGGGTCTTCTCCTGGGCAAAGTTTAAAACTGACCCCGGGACTGTGGACCTCCGCCTACTTGCGCAAGTTTGCCCCGGAAGATTACCACCCCTATGAAATCAAGTTCTATGAGGACCAATCACAGCCTCCGAAAGCCGAACTTTCGGCCTGCGTCATCACCCAGGGGGCAATTCTGGCCCAATTGCAAGCCATCCAAAAATCCCGCCAAGAATTTCTACTGAAAAAGGGTAAGGGGGTCTACCTTGACCCCCAGACCGGCGAGGAACTCAACACAAGGTTCCCTCAGGATGTCCCAACGACGAGAAAGCAAGAAGTTGAAGGTGCAGCCGCCGCCCCCAGAAGATATGGAGGAAGATTGGGACAGTCAGGCAGAGGAAGCGGAGGAGGAGGACAGTCTGGAGGACAGTCTGGAGGAAGACAGTTTGGAGGAGGAAAACGAGGAGGCAGAGGAGGTGGAAGAAGTAACCGCCGACAAACAGTTATCCTCGGCTGCGGAGACAAGCAACAGCGCTACCATCTCCGCTCCGAGTCGAGGAACCCGGCGGCGTCCCAGCAGTAGATGGGACGAGACCGGACGCTTCCCGAACCCAACCAGCGCTTCCCAAGACCGGTAAGAAGGATCGGCAGGGATACAAGTCCTGGCGGGGGCATAAGAATGCCATCATCTCCTGCTTGCATGAGTGCGGGGGCAACATATCCTTCACGCGGCGCTACTTGCTATTCCACCATGGGGTGAACTTTCCGCGCAATGTTTTGCATTACTACCGTCACCTCCACAGCCCCTACTATAGCCAGCAAATCCCGGCAGTCTCGACAGATAAAGACAGCGGCGGCGACCCTCCAAACAGAAAACCAGCAGCGGCAGTTAGAAAATACACAACAAGTGCAGCAACAGGAGGATTAAAGATTACAGCCAACGAGCCAGCGCAAACCCGAGAGTTAAGAAATCGGATCTTTCCAAACCCTGTATGCCATCTTCCAGCAGAGTCGGGGCCAAGAGCAGGAACTGAAAATAAAAAACCGATCTCTGCGTTCGCTCACCAGAAGTTGTTTGTATCACAAGAGCGAAGATCAACTTCAGCGCACTCTCGAGGACGCCGAGGCTCTCTTCAACAAGTACTGCGCGCTGACTCTTAAAGAGTAGGCAGCGACCGCGCTTATTCAAAAAAGGCGGGAATTACATCATCCTCGACATGAGTAAAGAAATTCCCACGCCTTACATGTGGAGTTATCAGCCCCAAATGGGATTGGCGGCAGGCGCCTCCCAGGACTACTCCACCCGCATGAATTGGCTCAGCGCCGGGCCTTCTATGATTTCTCGAGTTAATGATATACGCGCCTACCGAAACCAAATACTTTTGGAACAGTCAGCTCTTACCACCACGCCCCGCCAACACCTTAATCCCAGAAATTGGCCCGCCGCCCTAGTGTACCAGGAAAGTCCCGCTCCCACCACTGTATTACTTCCTCGAGACGCCCAGGCCGAAGTCCAAATGACTAATGCAGGTGCGCAGTTAGCGGGCGGCTCCACCCTATGTCGTCACAGGCCTCGGCATAATATAAAACGCCTGATGATCAGAGGCCGAGGTATCCAGCTCAACGACGAGTCGGTGAGCTCTCCGCTTGGTCTACGACCAGACGGAATCTTTCAGATTGCCGGCTGCGGGAGATCTTCCTTCACCCCTCGTCAGGCTGTTCTGACTTTGGAAAGTTCGTCTTCGCAACCCCGCTCGGGCGGAATCGGGACCGTTCAATTTGTGGAGGAGTTTACTCCCTCTGTCTACTTCAACCCCTTCTCCGGATCTCCTGGGCACTACCCGGACGAGTTCATACCGAACTTCGACGCGATTAGCGAGTCAGTGGACGGCTACGATTGATGTCTGGTGACGCGGCTGAGCTATCTCGGCTGCGACATCTAGACCACTGCCGCCGCTTTCGCTGCTTTGCCCGGGAACTCATTGAGTTCATCTACTTCGAACTCCCCAAGGATCACCCTCAAGGTCCGGCCCACGGAGTGCGGATTACTATCGAAGGCAAAATACACTCTCGCCTGCAACGAATTTTCTCCCAGCGGCCCGTGCTGATCGAGCGAGACCAGGGAAACACCACGGTTTCCATCTACTGCATTTGTAATCACCCCGGATTGCATGAAAGCCTTTGCTGTCTTATGTGTACTGAGTTTAATAAAAACTGAATTAAGACTCTCCTACGGACTGCCGCTTCTTCAACCCGGATTTTACAACCAGAAGAACGAAACTTTTCCTGTCGTCCAGGACTCTGTTAACTTCACCTTTCCTACTCACAAACTAGAAGCTCAACGACTACACCGCTTTTCCAGAAGCATTTTCCCTACTAATACTACTTTCAAAACCGGAGGTGAGCTCCAAGGTCTTCCTACAGAAACCCTTGGGTGGAAGCGGGCCTTGTAGTGCTAGGAATTCTTGCGGGTGGGCTTGTGATTATTCTTTGCTACCTATACACACCTTGCTTCACTTTCCTAGTGGTGTTGTGGTATTGGTTTAAAAAATGGGGCCCATACTAGTCTTGCTTGTTTTACTTTCGCTTTTGGAACCGGGTTCTGCCAATTACGATCCATGTCTAGACTTCGACCCAGAAAACTGCACACTTACTTTTGCACCCGACACAAGCCGCATCTGTGGAGTTCTTATTAAGTGCGGATGGGAATGCAGGTCCGTTGAAATTACACACAATAACAAAACCTGGAACAATACCTTATCCACCACATGGGAGCCAGGAGTTCCCGAGTGGTACACTGTCTCTGTCCGAGGTCCTGACGGTTCCATCCGCATTAGTAACAACACTTTCATTTTTTCTGAAATGTGCGATCTGGCCATGTTCATGAGCAAACAGTATTCTCTATGGCCTCCTAGCAAGGACAACATCGTAACGTTCTCCATTGCTTATTGCTTGTGCGCTTGCCTTCTTACTGCTTTACTGTGCGTATGCATACACCTGCTTGTAACCACTCGCATCAAAAACGCCAATAACAAAGAAAAAATGCCTTAACCTCTTTCTGTTTACAGACATGGCTTCTCTTACATCTCTCATATTTGTCAGCATTGTCACTGCCGCTCACGGACAAACAGTCGTCTCTATCCCTCTAGGACATAATTACACTCTCATAGGACCCCCAATCACTTCAGAGGTCATCTGGACCAAACTGGGAAGCGTTGATTACTTTGATATAATCTGCAACAAAACAAAACCAATAATAGTAACTTGCAACATACAAAATCTTACATTGATTAATGTTAGCAAAGTTTACAGCGGTTACTATTATGGTTATGACAGATACAGTAGTCAATATAGAAATTACTTGGTTCGTGTTACCCAGTTAAAAACCACGAAAATGCCAAATATGGCAAAGATTCGATCCGATGACAATTCTCTAGAAACTTTTACATCTCCCACCACACCCGACGAAAAAAACATCCCAGATTCAATGATTGCAATTGTTGCAGCGGTGGCAGTGGTGATGGCACTAATAATAATATGCATGCTTTTATATGCTTGTCGCTACAAAAAGTTTCATCCTAAAAAACAAGATCTCCTACTAAGGCTTAACATTTAATTTCTTTTTATACAGCCATGGTTTCCACTACCACATTCCTTATGCTTACTAGTCTTGCAACTCTGACTTCTGCTCGCTCACACCTCACTGTAACTATAGGCTCAAACTGCACACTAAAAGGACCTCAAGGTGGTCATGTCTTTTGGTGGAGAATATATGACAATGGATGGTTTACAAAACCATGTGACCAACCTGGTAGATTTTTCTGCAACGGCAGAGACCTAACCATTATCAACGTGACAGCAAATGACAAAGGCTTCTATTATGGAACCGACTATAAAAGTAGTTTAGATTATAACATTATTGTACTGCCATCTACCACTCCAGCACCCCGCACAACTACTTTCTCTAGCAGCAGTGTCGCTAACAATACAATTTCCAATCCAACCTTTGCCGCGCTTTTAAAACGCACTGTGAATAATTCTACAACTTCACATACAACAATTTCCACTTCAACAATCAGCATTATCGCTGCAGTGACAATTGGAATATCTATTCTTGTTTTTACCATAACCTACTACGCCTGCTGCTATAGAAAGAGACAAACATAAAGGTGATCCATTACTTAGATTTGATATTTAATTTGTTCTTTTTTTTTTTATTTACAGTATGGTGAACACCAATCATGGTACCTAGAAATTTCTTCTTCACCATACTCATTTGTGCATTTAATGTTTGCGCTACTTTCACAGCAGTAGCCACAGCAACCCCAGACTGTATAGGAGCATTTGCTTCCTATGCACTTTTTGCTTTTGTTACTTGCATCTGCGTRTGTAGCATAGTCTGCCTGGTTATTAATTTTTTCCAACTKSTAGACTGGATCYTTGTGCGAATTGCCTACCTRCGYCACCATCCCGAATACCGCAAYCAAAATRTCGCGGCACTTCTTAGRCTYATCTAARWCYAWRCMSGCTATACTACCAATATTTTTGCTTCTATTGCTTCCCTACGCTGTCTCAACCCCAGCTGCCTATAGTACTCCACCAGAACACCTTAGAAAATGCAAATTCCAACAACCGTGGTCATTTCTTGCTTGCTATCGAGAAAAATCAGAAATTCCCCCAAATTTAATAATGATTGCTGGAATAATTAATATAATCTGTTGCACCATAATTTCATTTTTGATATACCCCCTATTTGATTTTGGCTGGAATGCTCCCAATGCACATGATCATCCACAAGACCCAGAGGAACACATTCCCCTACAAAACATGCAACATCCAATAGCGCTAATAGATTACGAAAGTGAACCACAACCCCCACTACTCCCTGCTATTAGTTACTTCAACCTAACCGGCGGAGATGACTGAAACACTCACCACCTCCAATTCCGCCGAGGATCTGCTCGATATGGACGGCCGCGTCTCAGAACAGCGACTTGCCCAACTACGCATCCGCCAGCAGCAGGAACGCGCGGCCAAAGAGCTCAGAGATGTCATCCAAATTCACCAATGCAAAAAAGGCATATTCTGTTTGGTAAAACAAGCCAAGATATCCTACGAGATCACCGCTACTGACCATCGCCTCTCTTACGAACTTGGCCCCCAACGACAAAAATTTACCTGCATGGTGGGAATCAACCCCATAGTTATCACCCAGCAAAGTGGAGATACTAAGGGTTGCATTCACTGCTCCTGCGATTCCATCGAGTGCACCTACACCCTGCTGAAGACCCTATGCGGCCTAAGAGACCTGCTACCAATGAATTAAAAAATGATTAATAAAAAATCACTTACTTGAAATCAGCAATAAGGTCTCTGTTGAAATTTTCTCCCAGCAGCACCTCACTTCCCTCTTCCCAACTCTGGTATTCTAAACCCCGTTCAGCGGCATACTTTCTCCATACTTTAAAGGGGATGTCAAATTTTAGCTCCTCTCCTGTACCCACAATCTTCATGTCTTTCTTCCCAGATGACCAAGAGAGTCCGGCTCAGTGACTCCTTCAACCCTGTCTACCCCTATGAAGATGAAAGCACCTCCCAACACCCCTTTATAAACCCAGGGTTTATTTCCCCAAATGGCTTCACACAAAGCCCAGACGGAGTTCTTACTTTAAAATGTTTAACCCCACTAACAACCACAGGCGGATCTCTACAGCTAAAAGTGGGAGGGGGACTTACAGTGGATGACACTGATGGTACCTTACAAGAAAACATACGTGCTACAGCACCCATTACTAAAAATAATCACTCTGTAGAACTATCCATTGGAAATGGATTAGAAACTCAAAACAATAAACTATGTGCCAAATTGGGAAATGGGTTAAAATTTAACAACGGTGACATTTGTATAAAGGATAGTATTAACACCTTATGGACTGGAATAAACCCTCCACCTAACTGTCAAATTGTGGAAAACACTAATACAAATGATGGCAAACTTACTTTAGTATTAGTAAAAAACGGAGGGCTTGTTAATGGCTACGTGTCTCTAGTTGGTGTATCAGACACTGTGAACCAAATGTTCACACAAAAGACAGCAAACATCCAATTAAGATTATATTTTGACTCTTCTGGAAATCTATTAACTGATGAATCAGACTTAAAAATTCCACTTAAAAATAAATCTTCTACAGCGACCAGTGAAACTGTAGCCAGCAGCAAAGCCTTTATGCCAAGTACTACAGCTTATCCCTTCAACACCACTACTAGGGATAGTGAAAACTACATTCATGGAATATGTTACTACATGACTAGTTATGATAGAAGTCTATTTCCCTTGAACATTTCTATAATGCTAAACAGCCGTATGATTTCTTCCAATGTTGCCTATGCCATACAATTTGAATGGAATCTAAATGCAAGTGAATCTCCAGAAAGCAACATAGCTACGCTGACCACATCCCCCTTTTTCTTTTCTTACATTACAGAAGACGACAACTAAAATAAAGTTTAAGTGGTTTTTATTTAAAATCACAAAATTCGAGTAGTTATTTTGCCTCCACCTTCCCATTTGACAGAATACACCAATCTCTCCCCACGCACAGCTTTAAACATTTGGATACCATTAGAGATAGACATTGTTTTAGATTCCACATTCCAAACAGTTTCAGAGCGAGCCAATCTGGGGTCAGTGATAGATAAAAATCCATCGCGATAGTCTTTTAAAGCGCTTTCACAGTCCAACTGCTGCGGATGCGAATCCGGAGTCTGGATCACGGTCATCTGGAAGAAGAACGATGGGAATCATAATCCGAAAACGGTATCGGACGATTGTGTCTCATCAAACCCACAAGCAGCCGCTGTCTGCGTCGCTCCGTGCAACTGCTGTTTATGGGATCAGGGTCCACAGTGTCCTGAAGCATGATTTTAATAGCCCTTAACATCAACTTTCTGGTGCGATGCGCGCAGCAACGCATTCTGATTTCACTCAAATCTTTGCAGTAGGTACAACACATTATTACAATATTGTTTAATAAACCATAATTAAAAGCGCTCCAGCCAAAACTCATATCTGATATAATCGCCCCTGCATGACCATCATACCAAAGTTTAATATAAATTAAATGACGTTCCCTCAAAAACACACTACCCACATACATGATCTCTTTTGGCATGTGCATATTAACAATCTGTCTGTACCATGGACAACGTTGGTTAATCATGCAACCCAATATAACCTTCCGGAACCACACTGCCAACACCGCTCCCCCAGCCATGCATTGAAGTGAACCCTGCTGATTACAATGACAATGAAGAACCCAATTCTCTCGACCGTGAATCACTTGAGAATGAAAAATATCTATAGTGGCACAACATAGACATAAATGCATGCATCTTCTCATAATTTTTAACTCCTCAGGATTTAGAAACATATCCCAGGGAATAGGAAGCTCTTGCAGAACAGTAAAGCTGGCAGAACAAGGAAGACCACGAACACAACTTACACTATGCATAGTCATAGTATCACAATCTGGCAACAGCGGGTGGTCTTCAGTCATAGAAGCTCGGGTTTCATTTTCCTCACAACGTGGTAACTGGGCTCTGGTGTAAGGGTGATGTCTGGCGCATGATGTCGAGCGTGCGCGCAACCTTGTCATAATGGAGTTGCTTCCTGACATTCTCGTATTTTGTATAGCAAAACGCGGCCCTGGCAGAACACACTCTTCTTCGCCTTCTATCCTGCCGCTTAGCGTGTTCCGTGTGATAGTTCAAGTACAGCCACACTCTTAAGTTGGTCAAAAGAATGCTGGCTTCAGTTGTAATCAAAACTCCATCGCATCTAATTGTTCTGAGGAAATCATCCACGGTAGCATATGCAAATCCCAACCAAGCAATGCAACTGGATTGCGTTTCAAGCAGGAGAGGAGAGGGAAGAGACGGAAGAACCATGTTAATTTTTATTCCAAACGATCTCGNCAGTACTTCAAATTGTAGATCGCTNCAGATGGCATCTCTCGCCCCCACTGTGTTGGTGAAAAAGCACAGCTAAATCAAAAGAAATGCGATTTTCAAGGTGCTCAACGGTGGCTTCCAACAAAGCCTCCACGCGCACATCCAAGAACAAAAGAATACCAAAAGAAGGAGCATTTTCTAACTCCTCAATCATCATATTACATTCCTGCACCATTCCCAGATAATTTTCAGCTTTCCAGCCTTGAATTATTCGTGTCAGTTCTTGTGGTAAATCCAATCCACACATTACAAACAGGTCCCGGAGGGCGCCCTCCACCACCATTCTTAAACACACCCTCATAATGACAAAATATCTTGCTCCTGTGTCACCTGTAGCGAATTGAGAATGGCAACATCAATTGACATGCCCTTGGCTCTAAGTTCTTCTTTAAGTTCTAGTTGTAAAAACTCTCTCATATTATCACCAAACTGCTTAGCCAGAAGCCCCCCGGGAACAAGAGCAGGGGACGCTACAGTGCAGTACAAGCGCAGACCTCCCCAATTGGCTCCAGCAAAAACAAGATTGGAATAAGCATATTGGGAACCGCCAGTAATATCATCGAAGTTGCTGGAAATATAATCAGGCAGAGTTTCTTGTAAAAATTGAATAAAAGAAAAATTTGCCAAAAAAACATTCAAAACCTCTGGGATGCAAATGCAATAGGTTACCGCGCTGCGCTCCAACATTGTTAGTTTTGAATTAGTCTGCAAAAATAAAAAAAAAAACAAGCGTCATATCATAGTAGCCTGACGAACAGGTGGATAAATCAGTCTTTCCATCACAAGACAAGCCACAGGGTCTCCAGCTCGACCCTCGTAAAACCTGTCATGGTGATTAAACAACAGCACCGAAAGTTCCTCGCGGTGACCAGCATGAATAATTCTTGATGAAGCATACAATCCAGACATGTTAGCATCAGTTAACGAGAAAAAACAGCCAACATAGCCTTTGGGTATAATTATGCTTAATCGTAAGTATAGCAAAGCCACCCCTCGCGGATACAAAGTAAAAGGCACAGGAGAATAAAAAATATAATTATTTCTCTGCTGCTGTTCAGGCAACGTCGCCCCCGGTCCCTCTAAATACACATACAAAGCCTCATCAGCCATGGCTTACCAGACAAAGTACAGCGGGCACGCACAAGCTCTAAAGTCACTCTCCAACCTCTCCACAATATATATACACAAGCCCTAAACTGACGTAATGGGAGTAAAGTGTAAAAAATCCCGCCAAACCCAACACACACCCCGAAACTGCGTCACCAGGGAAAAGTACAGTTTCACTTCCGCAATCCCAACAAGCGTCACTTCCTCTTTCTCACGGTACGTCACATCCCATTAACTTGCAACGTCATTTTCCCACGGCCGCGCCGCCCCGTTTAGCCGTTAACCCCACAGCCAATCACCACACACCCCACAATTTTTAAAATCACCTCATTTACATATTGGCACCATTCCATCTATAAGGTATATTATTGATGATG

SEQ ID NO: 3 - protein, 786 aa, Homo sapiens
ATGAGACACCTGCGCTTCCTGCCACAGGAGGTTATCTCCAGTGAGACCGGGATCGAAATACTGGAGTTTGTGGTAAATACCCTAATGGGAGACGACCCGGAACCGCCAGTGCAGCCTTTCGATCCACCTACGCTGCACGATCTGTATGATTTAGAGATAGACGGGCCGGAGGATCCCAATGAGGAAGCTGTGAATGGGTTTTTTACTGATTCTATGCTGCTAGCTGCTGATGAAGGATTGGACATAAACCCTCCTCCTGAGACACTTGTTACCCCAGGGGTGGTTGTGGAAAGCGGCATAGGTGGGAAAAAATTGCCTGATCTGGGAGCAGCTGAAATGGACTTGCGTTGTTATGAAGAGGGTTTTCCTCCCAGTGATGATGAAGATGGGGAAACTGAGCAGTCCATCCATACCGCAGTAAATGAGGGAGTAAAAGCTGCCAGCGATGTTTTTAAGTTGGACTGTCCGGAGCTGCCTGGACATGGCTGTAAGTCTTGTGAATTTCACAGGAATAACACTGGAATGAAAGAACTATTGTGCTCGCTTTGCTATATGAGAATGCACTGCCACTTTATTTACAGTCCTGTGTCTGATGATGAGTCACCTTCTCCTGATTCAACTACCTCACCTCCTGAAATTCAGGCGCCCGCACCTGCAAACGTATGCAAGCCCATTCCTGTGAAGCCTAAGCCTGGGAAACGCCCTGCTGTGGATAAGCTTGAGGACTTGTTGGAGGGTGGGGATGGACCTTTGGACCTTAGTACCCGGAAACTGCCAAGGCAATGA

SEQ ID NO: 4 - protein, 261 aa, Homo sapiens
MRHLRFLPQEVISSETGIEILEFVVNTLMGDDPEPPVQPFDPPTLHDLYDLEIDGPEDPNEEAVNGFFTDSMLLAADEGLDINPPPETLVTPGVVVESGIGGKKLPDLGAAEMDLRCYEEGFPPSDDEDGETEQSIHTAVNEGVKAASDVFKLDCPELPGHGCKSCEFHRNNTGMKELLCSLCYMRMHCHFIYSPVSDDESPSPDSTTSPPEIQAPAPANVCKPIPVKPKPGKRPAVDKLEDLLEGGDGPLDLSTRKLPRQ

SEQ ID NO: 5 - protein, 789 aa, Homo sapiens
ATGAGAGATTTGCGATTTCTGCCTCAGGAAATAATTTCTGCTGAGACTGGAAATGAAATACTGGAGCTTGTGGTGCACGCCCTGATGGGAGACGACTCGGAGCCACCTGTGCAGCTTTTTGAGCCTCCTACGCTTCAGGAACTGTATGATTTAGAGGTAGAGGGATCGGAGGATTCTAATGAGGAAGCTGTGAATGGCTTTTTTACCGATTCTATGCTTTTAGCTGCTAATGAAGGATTAGAATTAGATCCGCCTTTGGACACTTTCGATACTCCAGGGGTGATTGTGGAAAGCGGTACAGGTGTAAGAAAATTACCTGATTTGGGTTCCGTGGACTGTGATTTGCACTGCTATGAAGACGGGTTTCCTCCGAGTGATGAGGAGGACCATGAAAAGGAGCAGTCTATGCAGACTGCAGCGGGTGAGGGAGTGAAGGCTGCCAGTGTTGGTTTTCAGTTGGATTGCCCGGAGCTTCCTGGACATGGCTGTAAGTCTTGTGAATTTCACAGGAAAAATACTGGAGTAAAGGAACTGTTATGTTCGCTTTGTTATATGAGAGCGCACTGCCACTTTATTTACAGTCCTGTGTCTGATGCTGATGAGTCACCATCTCCTGATTCTACTACCTCACCTCCTGAGATTCAAGCACCTGTTCCTGTGGACGTGCGCAAGCCCATTCCTGTGAAGCTTAAGCCTGGGAAACGTCCAGCAGTGGAAAAACTTGAGGACTTGTTACAGGGTGGGGACGGACCTTTGGACTTGAGTACACGGAAACGGCCAAGACAATAA

SEQ ID NO: 6 - protein, 262 aa, Homo sapiens
MRDLRFLPQEIISAETGNEILELVVHALMGDDSEPPVQLFEPPTLQELYDLEVEGSEDSNEEAVNGFFTDSMLLAANEGLELDPPLDTFDTPGVIVESGTGVRKLPDLGSVDCDLHCYEDGFPPSDEEDHEKEQSMQTAAGEGVKAASVGFQLDCPELPGHGCKSCEFHRKNTGVKELLCSLCYMRAHCHFIYSPVSDADESPSPDSTTSPPEIQAPVPVDVRKPIPVKLKPGKRPAVEKLEDLLQGGDGPLDLSTRKRPRQ

SEQ ID NO: 7 - protein, 900 aa, Homo sapiens
ATGTCAGGAAGCAACTCCATTATGACAAGGTTGCGCGCACGCTCCACATCATGCGCCAGACATCACCCTTACACCAGAGCCCAATTACCACGATGTGAGGAAAATGAAACCCGAGCTTCTATGACTGAAGACCACCCGCTGTTGCCAGATTGTGATACTATGACTATGCATAGTGTAAGTTGTGTTCGTGGTCTTCCTTGTTCTGCCAGCTTTACTGTTCTGCAAGAGTTTCCCATTCCTTGGGATATGTTTTTAAATCCAGAGGAGTTAAAAATTATGAGAAGATGCATGCATTTATGTCTTTGTTGTGCTACTATAGATATTTTTCAGTCTCAAGTGATTCATGGTCGAGAGAATTGGGTTCTTCATTGTCATTGTAATCAGCAGGGTTCACTTCAATGCATGGCTGGGGGAGCGGTGTTGGCAGTGTGGTTCCGGAAGGTTATATTGGGTTGCATGATTAACCAACGTTGTCCATGGTACAGACAAATTGTTAATATGCACATGCCAAAAGAGATCATGTATGTGGGTAGTGTGTTTTTGAGGGAACGACATTTAATTTATATTAAACTTTGGTATGATGGTCATGCAGGGGCGATTATATCAGATATGAGTTTTGGCTGGAGCGCTTTTAATTATGGTTTATTAAACAATATTGTGATAATGTGCTGTACCTACTGTAGTAATCTAAGTGAAATCAGAATGCGTTGCTGCGCGCATCGCACCAGAAAGTTAATGTTAAGGGCTATTAAAATCATGCTTCAGGACACTGCGGACCCCGATCCCATAAACAGCAGTCGCACGGAGCGACGCAGACAGCGGTTGCTTGTGGGTTTGATGAGACACAATCGCCCGATTCCGTTTTCGGATTATGATTCCCATCGTTCTTCTTCCAGATGA
